United States Patent Application Publication US 2013/0096032 A1 - sequence listing, part 5

SEQ ID NO: 124 - DNA, 114190 bp, Arabidopsis thaliana
gaattcgatggcagagaaacctaatcatcaagttatggagtacgaagacttgagtcatgacgtgatgaagacgtcatcacatcatatgaggaaggtgaagagtgagaagaaagcaaaagatgaagatgttgataaagaagcagagaatttcatcaatctaaagcacagaaaatttaacaactgtattatctaagtttcagttagtagagattctgttatatatgcaaaagatgtaacactgttcttctaattgtcacatctacttttattttggttgtgaattacaagaaaactggtgtataatccagttgttaacatgaaccacatactatcagagcacagctatcaaaagcacatttattcgttataaaaaaccttacaaaacccacaaagtggacacaacagaatctgagtttcccaaaatagaaactagaaaacatttaaaaaaaaattgtgaaaagccataaaaggaaagtctaaaggatggatctgcagagaggacaagttgtgtggttattaccaaaccatttatccaaacaagctgagtgaaagtaatgcttgcaggacactaactcactcacctcttcctcctctttaaacccacaaagacacacacaacagtccatagcttctctctcgttcctgcttcctctgttctcacacagagattcaaagtgtgtgattgagattcttcttcttctttttgaatcctcatgatcttggtcgtcctctttgttccttgcctcattggtctcagagctcaccatgttgacaacagatcttaccatgttctttactagagacactgaaacaactgtgttcattactagcattggcatcactccttcagacgctgtcgggtaatgagaaatacccattcttcttcctatagatactgtttctgtttctagagtctttcgccctcttcaggaggaagctttaataaaacagaggaagtttcttaacgttgttgatccagccactaatgtctaatcctctgtcttttaactataggtcaaaacgcgtggtatcacgcgtaaggtactagaccaacacatgattgtgactgtgtcacgaaagtctctgacacgtggttctaagcaagtgctttgtggaaagcttctcaagttcctgttcgccaagaaactgacacgtgtgactccactgatccataaaacacaacacgccacaccatttcagaatttacttgtagattaagtagaccgacaacaatctttaacattgatacttcacataccactagatgcacaggtttgatatacacaagtgcggttcaaaacattcatctttttttgtttattcgatggaaggttggtgatgattttgtagtgatgggtaatatctactacattaacatatacagactctatatgtaaatgcaagaacgcactagtaaaactgaatctgtcagcgtctagctactttaagaactctcctattaaatggttgtggctgttgaatttgaggagccttctacttgtaaggatttgaaataatccttctctgcgttagccattctactctggaacattgtccattcctttttgcatctatccctcacctgcaaaaccacataacaaaacaaattgacgtcgcttgttgcacaagttatgcgtcttcctcacaacacataattctcagcacgagagagagataaaaagctttgttaccccttgccatggtgctttcccgtctgtcgcctcaccctacatcaagcgaaaaagaatcagatttctgagagaagaagttaaaatggacatagagagagttctatgggatttacttggttgccaagggaaggaaaagattgatgaacgacccattgagaatcaactactcctatcttctcatgtgcaggctgcatttcggtgtaaaatatattcagattcgtcatataacagacgatataattagaaactctgtcttttgcgtgacaaacaacgaacttcaagtgtctcttttcttacctcaacacatcttctgagtgcaaagtcaagaccccaaccgtgtaccaaatcattctgttaacagtttaaggtaaagcgtataagtaaggcaggcaagaagagagagttagggaagatgaatgaagaatgaaacagatgatgaagcaaggaacctggatcacatgccacacgcatcgccaggcatttcttgaaaatacaggagccatgatctctacgaatctgcatttttgaatgacacaaaagttcgatactggttagttcctgttatagggaaaaaccaactcaaaacgggtaaaaagaaaggcttctacatacgcagcacatggagggagatgaggatctgagcaccatccaggtctttcttctgttatcctgataagattcaaagcccattacttcataaagatcattatacagaaaactaaacatggccataatctgagggattttatccaacatacttgtgaacttccatatctcctcgtctctttgtcatttgccacgttagtccctggtttggttccaagccaggttgggaaatctccaggccgtgcttcttcaccatctttacgtacctggaaacagataaccaagatgattacaacagatcaaatgaaaacaagaaaaatggaaagaatccatgcaaaggtttattacaacttactcttctgcgttaaaatgctcgacacccaggtcttcatcccagacgaagatataatcatatcttgctacaatatcagggtgcaaaaacctctttgcataccacctaatatatttccaggtgccaagggagtcagtagtcataaacacaccaaactattttctaccataaagaataaagagcgtttggtaccattttgtctgctttcgtacgctaatgtgtatagcagtctttgaccattcaaactcatcccactcagttacccggccgtcatagtgaaacaggacaatagtgaagttttctgaaaactgttgagaagatgataaacaatttatgacgtgaagtcaaaacatcaaacaaagggaatgaaccaaccttcttgacacaagcatcgatatttgctttctgattaatacccactgtaaatgttgcgaggtatcttggttcacttttcaaatcctgaggaagaaaataatgtataagaaatttacattacttttgtatatcagaaatgaatgctatgagcacaaacctcatgcggtaaaccccataatctgcgcaaatagaagtctgattcagcagcaaccatacccggtggcaacatttcagcaccacgaggattagaaggtacccagatctgcgacaaatcagaaatgaaacatgaaaacatggacagatttgagaccattaattatgaatcacagaaagaaaaggttaacaaacacatgttcttagcttctgtcatgttgggcaaggtgaaatctaattaactaaactttgtaagaccacaaagaaattctctgttaatttgctataccacttatttcattagcacgtatctcatgttttggagtacaaaactaatcagacgtaaggatcctcaaacatgtctcatattattaaggagaccttagacttttagtcttccgtccttgaagatgaatcccagttgcatattaaagtaggaatcggtaacttgtctaaataatgtaaaggtccaaaacattcccaagtcataaacaaattaaggagtagaagcatgcctttgatttgtcaatcggagtagatgagctgctatcgttaccctttgatgatgaccaagctttatgactttctggagttgcaattttcgaacccttttcctcgatatatgagagatcgtttgaaggaagaaagtttgtagggagactcacctgaaatatgagaacaaaaatcttccaatgatgataaggaaacaaatctaatcaaacacagaaataggacaataaggattgattcggcaaccttagtgattgataatgatggaaaagatattccaatcagaaagccaaatgttactccaaaaaatgccgttgcaatgatcttcattccatcttttgatttcctactaattgaactgaaataacaagaacaaaatttgactaagtttctctgcaacaactctcgaatgaccaaactaattagctaaaaagagagagacaagatcttgacctgcgtgaaaagattcccatatcttctctaatattctgattgtagctccacagcgaaaatgtgcagcactaaatcaagaagacttttcaaaaagtcacccactggggttctgtctactgtggtaactccaaagactcaaggcccctcctgacagtagagaagccaggaacctgctatgcgtaaccccgcgagtcgttatctagagaagaaaaatgaggcttctaaataagatccaataccaagaagaagaagacacacatgacaaacagaataggaccactctttaaatggaaaatctggtcatcatccacacttttcaataaaattctttgtcaaaagcaagtcattgtcgtagaacctacacagacgaatacaatatagtgcttctaaaccaaccattcaataacaaactattgaccagaaatatatatctacaagtcaaaacaaaccattaaatcattcccttacaagatgatcacaattgcaagcaatgctagcaaacaagcaagaaatcatgtgcttcccctttggaaaaagcaaaacaaacccctcaaaactaggagcaaaacaatacaatcaatcaatcacagaacatgaaaatcacaaagtcgtctactaaaaaacagaacactttacttagaatgcaagacagaaacaaaaaaacaattaaactctgtaaaaaattatcacctttgattaaagaacactaaccatgaatgttgaggttttcaaacgcgaatatcgaaatcaatcaaaagcagccataagactaaatactcaaagagccaatgtttcaatatcaaagagaagtaaatggtaccaaaatgacaattctccaaatgcataggctaaaatctctcatataatccaaattttctcaataaaacaaaagtgaaaacagaattatcctaacaagaaaaaaaggaatcacctttataatcaataacgaacctgggatcaatcagaaagcacaacgagatccttaaaaccagtgaagaagaacacgagataatcgtttcgtaccctcacaaacaaaacgattacttcaaaccctattcgcaaaattggagatacacgcgtacacacgaatatgttaaaacccgtgatcgtcttcgtctagagacaaaacaaacccagagaagaaacgccaaaaatgtggaaacgcgtcttttaagtcaaaaaggaatgatttttctcgaaacccttatcgtttcctttcagaaattcaaagaaagagtcggttttggtttggtttggtgaccagaggaattttctgggcgtatatttaaggtgcagaagaagaaaaaccagaaagctaagctgcttcttcatacaaattaatttcaaagattaaaaattttaaccccaaaacgacaccgttttagaattgtgtcttgatataattggctaagtattcataagcgtgtaaaagtaagcacaacaacaaaatttcataggacccgacacaactttgaatccgtggaccgtacttggtcgacatataatgatgccaattaaaattcttgtatcctttttacactatactgtttgatattttttaatatgtcacgaagaatcaaagaaaatctatcaatttcacttttttcaaaattgtagtagagtcttttactgttttaatttgtcatattctttgctacaaaacaagcaaaaaatatacaataaataaacccaagaatttgcaagatctttccgaaaataacggaagaagataagatggtgctaaaagaaagcaacataatcaagatacatatttgttactttaacagtgaaagaaattttatttcttaccttagaattgtatgaatggaaaagatttggacttttggttaaccaaaaactttattttctggaaaattgtgtattaaatagagaggttggaagtgatgaaaaaaaaaataaaaaaaaatagagaggttggaagaattgtatggcattgctatattttgagtgatttaaagccaatgaaagtttgactatgtccattgataaatagagttgccaaactctataataaggaaaatgtagatttcgtaccaaactgaagagtccactttctttaataagaggtcccccacgtgagaagtttagaagatgatacggtaaaaaggcatttgaaggtaaaagaagattgaaaaacaattgcaatcaattttgttcaagtcttcctatatcacttacataagaatagagctatatatttacgttacaaagtccacatatgtagacatgactcttttgggtttatgtacatattaaggtgttattacacatcgatcaacatatcacaaaatagactatacattggcttcaccacaaatcggactcgagactaaaaagattcacaaagagatggaaatgaaaacctatgcttcattggcttcagatactgctgcagggaaggcaggcagccagagctctacacgagtaccgccagctcctaaggctgcatcggagctgcgaggtgatataaccctgatcacgcatccgtaactctccaggatctctcgggctacggttaaaccagccacaaagttccatgtcatattgtcttcaaccatgttttccgacaggagttctgctccaaatggtgttagcgaatgcatttgcgtctgcattgatgtaacaaatttatgttaaaaagcaatatgattctcatattaaactggttaagccctcagacttaaatacaggaagtaaaaagcagcagaatataagttcggtcttgattaccatatagcgcatatcaggaccatcatcatcaattactacaagactaccgccagcaggagctctggtcgacaaaatttcaactttccccccaacatgagtgcgcaacaatgcaccttcgatgaggttgctcagagcttgcctcaaagctggttcttcaacagcaacttgcagggaagctgagttctcacctagctccactactctttgctgagtaagtgctagtggtctcacagtctcgaccatatctaaaagcacattagaaatgtcgcatggtcttcctgacataaatgaaagagataagccctcccaacactttgtttcaagtgaagagttttgtggcaagacgttaagttaattgctcagaaacttgtaccttatactgtgcatttgtaggggtgccagggcaagaggtggcataggcatttctgaatcatctaatccagaacccaaggaaaggcgtgtacttgagatttgtgagccatcaatggggtccttatgttcatactttgatctccttgtttcattgtgtgttttatttatcttctttagggcttcttcgttgtggcgcactatattagcctgaaaatgaaatgcttgtaagaaatacaaaccgaaaaatcaaattcgagtatggtttgacagatttcccatgcgcaacacatctaaagacagatttataaagacaactgaaaatagagtgatgactctctcaagaaccaaaagggacaaagtaaaagaaggtgtaacctttgtcaagtgaactgcatcctgaagttcttcaagggtatcctttatttgatcaccttgaactattaagtcttccacaatatcatgtgaaatctacaatgtacaaaaacccaagtcagtccgataactgcaagactcagggagaataacatttccggctacaaatgctaattgcaaggacctgatttctcttagtgtgagttgaaagcattttacttaaagtcctcatggtagagagcggaccacggatctgccaatacgcaagaaagaaaaatgcgtaatataaactaaaaggagacattaattaacataagatctatgtgtactaagttaacaagtgcgtggcttgtacctgctccactagcttactcatcctcacattgttttgccaagatgactgttgaagtaacattgttttctatacatacccaataataaaaaaaaagatcaataaggattaaagccaacaaagacggtcaagcaaaaacataagaacaaaggaaaagacaggatataagaacaacctgatccatgacataagccatagcgagagtccgagaaatattaatcgcatacgatctctgctcttcagtgaaaaccttaacagaaggaagtttaactctaggtgattttgtattagctgaagcaggcaaagcataagcttcctcaggggaaagaaactgatttacaccatgcggtttttcctcttcctcctcctcctcctcctcctcggcttctactggtaactcagcaaccaagaaaccgacaacaaacgggtgtttcaccattggaaacacagcagctctatgtttactcacaagttctacctatcatccacatattatgtcaacaaaaaaaccataagtaaacttgagtttaacgcagaggaagaagaacacatacttgttgactagaaagtgatgcttcagctgctcgtagacccgcagggataccaaagtttccaactaagatcacaacgtctccagcattaacacttggataacaagtgacacgacgcaactctaatcgatccatcacatagctaccagctggtcttacatatatctaaaccaaaaccaacataaaaattcaacctttaatctaacaacactctattttcaagcaacaatgatgtaaaaaagcagagacgcaccgagagtactgcgtttggatcaacgatttgacgaaagagatctaattgctcaagacaaagccgttgaaaatcaggacttggcaagataatcttagtcttgagatggtctttctcaatcatctgtgtgaactctacaggagttgttgaagctccacgaatcgcggaagctatagcggaagcagaagcaaccatggtctctcctcctccgggttctgattcttcattagatacagtgtggtttacgtaacggagaccgcgtgtaaatatagaagacgacgacgaggaggaggaagaagaagaggcattgaggagcttaagggagggattagaaggtctagggtttggaatagaattggagaagtgtagattagggtttgatgagagaagggtctgagaagcgattgcagaaagaagcatcactacggaagacgacagtggagtctttactttgtggctgagactgaaactctcgcgaggaagacgatcgatatacgattatagtttacacacaaaacaactacaactaaacggcatcgtattaacagacttgtaattatagtttacacaaaaaacaactacaattaaacggcaccgtattaacagacttgtaacagtttcagatgagaggaatgtaaaacggcgacgttttgccatctgatacattaacctctaagaagaacattcagttgtttttaaattattgtaaagtttttacgacgtttaaacattttcacaaagtttcgataatttatgttaagcatcacttcgaaagttgtgatgactggtgaacagaattcactgggaaaaaaatattagtagggcattaacaatacatttctattaacaactaggggtatttttcttaaattttcatgtttctactaatgtttaaacacacgttcttccaaacttgtagaatggtaacacatctattaaagtaagaaaacactatgttgttccccatagctaaaagaggccaagaaaatgttagatggtcaatcagtgagcttactattaatcatatttatgtagccatagccaatcaaacgaagcaaagcccttttcaaccagttgaacaaatccaaacaagcatgtttcaaccattttggaatccaaacaatcatctctacgaacgaaaccacacaacaatctcacaaccctgtttcattaatgttgcgataatcgtgagagtgtatacacgacaactcatgcaaaaaaagataaaagaagatttgagaaaaaaaacgtgatagaaaatagagacaacaaattaaaaaaactagatatctacaacgaaaataaaataaaatatgaaaatggaaagctaccatataaacttaaaaagaaagaaataagaagagaatcctccaaagaaagaaagcatatttgtatgatggtaaacttacaagtattttcgtaaacatattcaaaatgtattgatttataactaaccctatctcaataaaaacatatcacaaatctctgatttttgtgttttgccaaccttctttctttttctggtaggggtaacgtttctcttcttttgaggataaaagtcccgtgattgagttttggtctctttacatctttagctttaccaatgaatccaatcctatcttctttgtttgctctctctttgctttcttcactatcaccatcaacacatgcccatcaatgccatttcccagcaatctttaactttggtgactctaactccgataccggcggtctctccgctgcttttggccaagctggtcctcctcacggctcttccttcttcggctcacccgcgggacgatactgcgatggtcgcctcgtcattgacttcataggtacactaactcttccctatccaaaacgtttgcgttttttgtttttgctgattttgcttctgttttgaacatagcggagagtcttggattaccatatctaagcgcgtttctagactccgttggttcaaacttcagccacggcgctaacttcgctaccgcgggatctccgataagagctcttaactctactctacgtcaaagtggattcagcccattttcactcgatgtacagttcgtacaattctataacttccacaacagatctcaaactgttcgtagtcgtggaggagtctacaagacaatgttgcctgaatccgacagcttctcaaaagctttgtacacttttgacattggtcagaacgatctcacagcaggttacttcgctaataaaaccgtagaacaagttgaaaccgaagttcctgagatcataagtcagttcatgaatgctatcaaggttggtctctctgtttctgactctgattttgtttaaagggaaatcataaaaatgtgttttttcttttggtgatagaatatttatggacaaggagggagatacttctggattcataacactggacctattggttgtttagcttatgtgattgaacggtttccgaataaagcatcagactttgattcacatggatgtgtttctcctttgaaccacttagctcaacaattcaatcacgctttgaaacaagctgtgatcgagctaagaagttctctatctgaagcagccatcacttatgtagatgtctactctctcaagcatgagttgtttgttcacgctcagggtcacgggtttaagggatcgttggtttcgtgttgtggacatggagggaagtataactacaacaagggtatcggatgtgggatgaagaagattgtgaaaggtaaagaggtttacattggaaagccgtgcgatgagcctgataaggctgttgtgtgggacggtgtacacttcacgcaggctgctaacaaattcattttcgataagattgctccagggttaagcaaggcctgtaaaaggcagtgacaacaagaagaaacaagcttttcttctttttatgagtttgtttctatgatttcttagacaggaaacaaatgtaagtcactgatatgaatttagtaagaacgcaataagatttatggtgagattagtccattatatattatgaacaagaatctacataaccactagagtctcagagagatatgatacttatatagaatacaaacatatttgttaagagttttcagcctttgtaatggttgagatcaattatcaccactgtgatatcatccatactgcctctttttgcagccaggttcgcaagctctttgcaagccgctttggcccaaagagacttccacggtgttatcggtgactttgaaggtgaactccctatttcacggttgagtgagggtgattcattctctgagttgtagtagtaactttgggatttagcacatctgggagacttgaccagtgaagctcgacgaagtttcgaagatgggctcatattgacaaagccctgaaccaagttctcctcctcactttctttaggcgtctttctctgagctagaacatgcaacacggtataaacagcttcttgattgctaaccacatcccaaagtccatcagaagctaagacaagaaactccatatcttgttccagttctagtactctcgtctcaggttcagcaaccacccacttctttaagtgtgcatctccaatgcttctggaaaccgcaagtattccctgaactcgccaagccccttgatgattatcgacataacctccctgtaaaccaaatgtcatgaaaggtatcaaactctactctctcaacacacaatcagcaaaaatacaaacttcttgacacttgacaacattacctgactctcaattctttccttttcatcatcccttcctggtttgtgatcatcagtaagagcctcagcaacacctgctctacacaggacagctctacaatctcccaaatttgatacaatcatctcctgatcttgtatcacagcagtaacacagcaagcaccactcacaacaccctaatatttttatgcaaccagtaagttcaaaatagattgtaatctttcttacaagtaaccttcaaagattgttcctttattaccttttctaggaaatcacgatcagtcctcaaaaaagcagccttaaaggcttcaactttctcctccttccccttacaattctccatcatctcaacaacatatttgtgcaaattctcagccacaaattctgcagctttagcacctccatgaccatcataaactccaaagaaactctacaaaaatcaatcccaaacccatcaaccacaaaacacacttaagatctcaaacctattaattcaatgaagaggaagaaaaaaagatacctttttggagttaccaaccaaacaaggaacaattctgtgagtatcttccataaacttcttcttaccgtttctggagacgacaccaaaaccattgccaccgaagcttacggtgccgttttggtgagcaaagtctgtgaaactgaagtaatcagttcgaatcggttgttgaggattgaggtcagggatatttaggtgggcaggtctctttctctttaaaggcgagacctttgcgtcaccctctctgaaacggaagtaatcagttgaaatcggttgttgaggattgaggtcagggatatttaagtgggtaggtctctttctctttaaaggcgagacctttgtgaccgacaatggaatagaacaaggagagggtgacgcaatgctaagtgtactagccatgaaagaagaaagggacgtgattgtttcttctgagcgaagtttattagtcatattgttgtcacaagagagctacaatgactacgaaatagtgtgagtggcaacagtgaattggtaaaagtataaatagataagatgcactagggttttggcgcagtcaaaaatatagaaagttgttacaaacattcaaattggaggaagaaaaaaagaatatttcgatgtatttattagtcaatgcgttatataggataataggtctatctatttattagtcaaaggatttcgtttttgtctttttataattatgagattctgaacagaaatccaaatgtatttccttttgttttcttataattaagatattctgaacttaaattcgaaaatattttcttttgtctttttataattaagagattcacactatttcgtaaccgttttttggtttatttgtaatttaacaaaaattgatatttagttaatataatgtattgccttaaactctttattatataatataaataaatacagatataagatgtgtttgataataacttgttcttgcaagtgaaagatgatctttgcgtttggaaaagctgtatgcccgcatcgtcagagtatttgggcgttctctcgggtgcggaagactcgcggcatttctgattgaattgggattcctcttactccaacttatgctacttcttttgttttactcttgttttgcagtgttcttttgttatgtcgtacgtttgtagattttggtcttctgtcttctttgtttaagcctctgtattctgtaaaaaactgaaaattggtatgaaatcttcacatgtttacccaaaaaaaaaaaaaaaaaaaaaaaaaaaaaaaaaactaaactaagagattttgaatgcatatccgtaatgcgtacattaagttatgtacttatgtgtacgataatttgtaattaataaaagtcgatatgtataatgaaaataatgtattacctcattgtgacagcattaaaaatcattgtgacatattacgataatttgtaattaataaaagttgtaaatttattattgaacttaaacatatactttttgtatctcatctcctcattgtgacagcattaaaaatcaacaaatttagtttttctagtttgttaaaaacccaaacaaaaatgccgcctaggtgctaaatgttaacctttcacctccttatttgatatttagttatttaccaatatctaaactcttatttacacaataatataatcaaaatttgagtattcatgaaagttatttaactcgtattatacacaataatatcttacattggcttgacatatttacttagaaacttaactatatataagaaattttttgggaattccttctttcacctattcgatataggagaaagaaaatgaaaaaaatataacctttttgaaaaataattgcttgtggacccagcctattttagaactgattgttgtggaccttgtggtcagcgcctcagcggttacaccaactcaccatatatagatggaagtctttttttttttgttggaacactaaaattaccatatatagatgatgtcatatttgtttttaaccaatgaaaaattatataagtaattgatatttgtatattttcttaaatccaataccaaattaaaagatatgctgtaaattaatgttattttaatacttaatacaaacattatttaaaaatacgtttgaacctccagaaattaacattttgttaaattaaaaattttccagttctgaattgatatttaaactcaaatattacttttataaattaataaatatataaatcacattgatcactttttgtgagttgtgacttgtgaggcccatctctggtcccgcaatcattttcattgttataatctaaactcatcacatagtgctagtgatacttaaatgaaagaaaatcgaaataccaaatatccttgaagattaagaaattcgatggggggggggttggtgttcttgactttagcaatatagacggttatgatcagccaacgactaaaaatcttcttacataagacttcacgtaaggaagatattgctttaatttagaattagctcgtttccattttatgtttaaagacctaaacaatttttttttttttagatttaacatcgagtattcgaatttgcttaaacatccgactaatttcaaaactgaacagactttttggtatatttaacttactagatggtatatggttttagactcggcctacgacaaaaacaaaacaagtaaaattatatattaagatctccaaatttaaaatcggattattagatctttgtcaatatttatagttatttgacagtatgacactatccgaagacattttagtatttactaattactattggtggacttttttaacaaaaaaaaagttaaaaaaaaattatagtgaaaattcttgataagaaagaaaatctggataatgtataaaagaacccaattttctagatttggggcactgtatccgaaaacattggaccagtcctaataattcttgctaacatcatggtgtttaacttatcctcaaaactttgattttgcaagatacaaaagaacacaaactttgaatttatgttcaaaattaggcgttacaatattctaaagcacaccaaaaacacattcatataataaaatcataatacaaaggaagcaacgaaatggaataatcatgaaccttagaagattccatgtaacttccattaacgtatttaaataagagatcatgttggtgcggtggtctttgtcctctttgatgcgccacgtcagtagcaactagagtcatggtccgtttctgcatactcatcaacacgttgtgccacgtgttaacccttgactgttccttgccgtgaaccccaacgttcatctccgacaagtcctcgcttctcacgcccatcacttcctctggcttagcaccgtctaggatccagataagacaagaacaaaaccctttcgagatctccgaatcactgtctgctttaaacctcatcctcccaaactcatccatctttatctctaaccacacttgagtcgtacatcccgtgactcggttctcggagatgcgagccgactcatcgagcggggctagagttgctgcgtagtttaagagacgttttacacggtcgataggttcggttaaggaccggaactcggatacgaggatgcgaagcttgtcggaggtttttgttcccaaaggagcatcaaccgaaaccgttgccaaagaaaaagggcttggagcttttggattcgagccaagattaagagaatcgcgcatgcatgtaatgggtttaggagagaatcttgaagtgaatcttgggtttgggaaagattttgttgttggtctagaggtagaaatcaaaggaggagaagcaagggccttgaaggacgatgaagtgttcatgttccgtaacaagggcaatgaaaagaaatgggaggaggaggtagaagaaaacgagagaagagagatatttaaggataatcaaaggagaactccttgaactacgcgacggagagaggatagtgattagatgcatagagcctttctataacgcgccaaaactatttttatgtttattgatctatctatatataatctatcttattttttaccaaaaaaaaaaagatctatcttgtaatgttattttataaaatactttaaaaaaattatatatttaaattgtagatttttaaatggtaagtaatctaacttcctctacgagccttgaaactagtataggttttttttttttggttaaaggaaactattataggtttaatttagaattttttggtctttgatttttttttttttttagaaaattaaaatgatgaaactgttagaatataagttgcgactttgagttaggtagcaactgaagcacttacaaaaattatgaatcattgtcatcattataaaatgcttcgttatattcttttaatcaggaaatttttgaaccaaattttcaaactaattttataatctatgcaaaaacgtaaaatttcttgtttagtcgaaagctaatccaagtacttggatgccaacgtgaaactctaaatgagttggaattttgaatatctggtaaaaaaaattagaatgatttaatttagctaataatatcggaaatgtccatcttaattttcacttatatgtgacaatgatacaaatacgaccaagtcaactagagactttcaacttcaaaagagataggccactactaataatgcaattactaaatagattgcaaaacaaaatacgaaatgttttgttttatcgtgtgacgttaaatgttatgatgcgatatggacatcatttgaggcggcttctccagtgacaatctcctttttattattttagaaataaattatggatttaaaagggaaagaacaaaggcatattcgattcgactactgaattagtgatatacttttagagccccatactgtcggaaagaggcttgggaaataatttaaagttgttttcatttcgtcgtcatagcttacggctacacttgagtgtactgaccaaaaccaattttttacttgtttctaaaacttttttccattaaatatcttaaataattcgtttcgtatacttcccactatagaaatgtgtttagaatttagatcacttaaaatagtagataataaactaagaagattccattatgtatatggaaaattccaaataacattatttaactatccccttcatctccaaaggctccacagtcaaggattgcattatagctgtaaacgggctagtgatctatcacaacaacaagttgaagacactactggccacgctcaacaaagagaccaaggattcgactttcatgttcattgattactacaacgccttcttgaccgttttcaagaacaatggagagactccagttaagaaaaagtaaaacacaacattcttgaaatccatattttcaaggcttttatatattgtgtgattggttatggaaatgtagggagtacgcggtttaaaactccgttgaaagaatgttgaggaggtgtttgtggggttgtggacgagaaaggtcagaagaactataccttatgcgatgatcctaagtctactttcttctgggatgtacttcaccctactcaggcaggatggagctcggtttacgcggttttaggcaaaaatctaactgcatctttgatgaaagcgtaaatccacttatcgtgatcaaagaaccgaaatgggttcgagattaacaaaattcttcttctgtagttcggtgtgtttttcttctcttatatctttgttatctctccctcttctttcgtttgtgcttgcaagtctttgtgcctctatctatgtattgtgtgttatagaataaaaatgtgaactttaagaaaagtaaaatattgaaataaaacactttttgtatcatgctctgtcacacactgtttctacttaacatttacatctatgatgttatcattaactcaaaaaaacgtaactaagaaaacagagatatgtggtgacaatacaatgtgttaaataacatataatgagaagttaacacattgtattgatttatatcattatatgtttaacaataaaataaagatataagtgtttatcaacttttcatgtctaaatttcttaaggttcatagcttgggttatttggttgtggagttgctgttcaacttttcttgttggatgatagtatataacttaatagtaatatattgaactgtatctagcatttagtcaaatcttttatgcaggggaagataaaattttaacaaaaacaaaggaaaatgtgataatttatcttttgcaagaaaataataaatataaataaattattgaaaatcatgtaagaaataaaataatatttctactgtatatttcaatttcgtttttccatatcttcaagaaatcttaatttatttaaaaaatatatatttataaaattaataaattaagtataaaaatatgcatagatttttttggtaggataaaaatatgcatagattgtaattgtaaaattttattttaatttttttcttatggtatatgatcccccaaaaatttaattatcaaactaaaattttaattactataagtttacttcccttattttttgttttgtttttgtgaaatggatacgtatataaacgtcacaattggtgaattaaaaaaatcaacttcacaagagatccttgggctgattcgattacaggtaacgtctctctctctctgtgactctctcaattagtttgaaccagtcaactcgtaaagcccttgtttcctgtaattttccgaattgggtcttcccttaatttatcatttctcgccggaaaaactttgagaatttccttgtatttcacggcgatgctataatcctcctgaaagcgacttactgatatatattagtttattaggcaatgaatgtgaaatttaccgagtcaaacgtgtttaaacaatgtaaaaggtgaagactttgatgaaaaaatccaaactttggatctgtttcagagtcaataagctctctcatatttatatatgcgtgtttgattttgataagaagggaactttgttgttggcttaatctgattttttgacatatgcttgaagtgttgcaggcgattgttttgtttatcttgttttgggtttggttgtcttggatgggaggaagtagctctaaagagtcacctagaggaggtggaagtggtcgtaggtatgaacgtagtgtgtctgggagctcatcttattcgtctgcttgggaccagagcagctattatcagacaccaaaccatccatctgcgtctcctgtttcatcctataattctgggagacaaacaccgaagaatcttgagaggaagtattcacggattgctgataactaccgttccattgatgaggtttgatgatcactcttgtttttgtttgtttgtctcttaggtcgttgtgtcggtttgtgaatctctctattggtgttttgttgatatttcttttcttttaggttaccgctgctctttcacatgccggtttggagtcctcgaatctcattgttggtatagatgtcaccaagagcaacgagtggacaggttagagaatttatctcaatgttttagtatatgtttctttgacctggaagctgacttgggtgatttgatttaggggcgagatcatttggtaggaagagtctgcatttcattggaactactccaaacccttatcaacaagctatttccatcattggaaagactttatcggtttttgatgaggataatttgatcccctgttatggatttggagatggtacaaaccctgattgtttttatgtagctgttaagttcctgtctagaatagattttaaggttggtttctctttgactatgcagctacaactcatgatcaggatgtcttcagtttcaatcccaatgatacatattgtaacgggtttgaagaagttctcatgtgttacagagagattgttccccagcttcgtctctcaggttgagtgagatgaataatcccttttcttctgcatgtcttctgaatcttgctgtactttttccttatagtttgctgcttctcttacaggtccgacatcttttgcacctatcatcgaaagggccatgacaattgtggaagaaagtggtggccagtaccatgttcttctcattatcgctgatggacaggtaaagattggaacctaattcgactagagaaagtatttcttgtatctatttgtgtttagttataatcattcccagacatttgtgtactgtatagttaccattggagcttttaactatgacaggtgacaagaagtgttgatacagataacggtggattcagtccacaagagcagcagactattgatgccattgttagagcaaggtaataaatactatttcctttgacgaaaatccaatttcaaactgtgtctctctaacttgtggtggattctgttgcagtgaatatcctttgtctatagttcttgttggtgttggagatggtccctgggacaccatgagacagtttgatgacaacatccccgctcgtgcctttgacaatttccaggtaataatatcaacatgtttctacaatagtgtagatagatcccttgtctttttcctggcaaatgtatcaatttcaaaggtttttgttgtctatttgaatcctttcagtttgtgaatttcacggatataatgtcaaagaacattgatccagcaagaaaagaggcagaattcgcgctttctgccttgatggagatcccgtctcagtataaagccaccctcgaactaggcttacttgggtaagtaaattcagatatttgagttcatcactgcagcatttatgaattgatctcaataaccgccaatttcgttccttgtttcgaatttgcagacaaagaaccggacattgtccagacaggattgcgcttccaccaccaacttatgctactcaatctatgcgcaacagcccaagaacttcccgatcaaccagttttcaaaacaaaccatatgataatggtgtttcctctacaccaccttcaactactcataacgagagccaggtatgatttacaaagaaagaaacaacaatgcattgataatcttttgctgctcgtcacatctttttgttggataaacagcaacagttttgccccgtatgtctagtgagtgcaaagaacatggctttcaattgtggtcatcaggtgcatttccactcccgagttacctaagcatcgcacttgaatcaaaatcgttaactttcctttgtttttcttattttgctcatcagacttgcgctggatgtggggaagacctccatgtgtgtcccatttgccggagctcaatctcggttcgtatcaagctttattaagataagtctctcaagaactgaaggaacccgaggtggtctgagatctttcacagccaacaccatcccaacttagatctcatttaccagtgtcctaacatttgtttttactttgaggggaataaccggttcctctcaaaggttttgtagataatctgttgtcaattttgcattctcattgcacatgaaaaaaccacagcagactctctcgtgaataaaggatcctttctctgcggttacacatttttacttaaaagaatttgaatcttgaatggtcctatgacatatgtatcaaacaacacactactatatacctttcttgtttgaaacatctagtcttcaacacagtagcccagatggtcctgctttaacttccataattgacatcttatggggtcgtatctattctctgtcgttaaagattcataattgatgtaactgtcaacgaaagatggcaaaaacacaaaggctattataggtttctatcaaactgatcactttttactgtaagaatatatgcgatatacttttcttggtcttcttccctcagtaatgaacaagatcccaatctgagtctgctattctttcttactcttccacaagtttgtattagttttacgtatatgcggttaagcagtccgggcggtgatcctctccattcattcatttgcttacccagaataaatctagtgtgtgtctttcatcacgaaaagtattaccacagtgataagatgtgtagattttcaaatctgaaaaagagataaagctatgtttcaagtctttgaataagattccagtcatattgctcaacaatctttagtttcagggaccctactaatatttttatcacgcaaaccaaagagacaaagctgttttgtgtttagtaaatacatattcaaagtagagtctttttagaacaacaaccatttaccatgaatttccgacgcgacatctctgctctgaatgaagacatcatagttgagcagctacttcgtagccatgatccagacggtcgctggcttgattccgaaatgctgcttcaagaagtcgaaaccatcttaagctttgttctgcaaaatgatgtgagctatatccatcccttggggtccaattcttcaaagagttgtcttgattctggccaataacaatgccactaaactttcaggtttctagaccgcttctgacagagaattgtatcaccaccattgaagtttttgactcaaaggaaacactaccatacgctatcttcagaatctccgttcaggtaaactgatcatcctttcttctcaaataaactctttctgaaagacccgaaattgtgaaactcttgaggttgcagatgctttgtccatgtactggggaaaatgagatccggaaaaggacaatggttttgtttgatcttctcaaggaatacagatgggatgcaaaagctgtgttagtactaggagtccttgccgcaacatatggaggactattgctaccagttcatctggccatctgtgatcccgttgcagcatcaattgcaaaactcaaccagttgcctattgagagaaccaagttcagaccgtggttagagtctctaaacttgctcattaaagccatggtggatgtaaccaaatgcatcatcaaatttgaaaaaattccatttaaacaagcgaagctagacaacaacattttgggagaaaccttgtctaacatctatctgactacttatcgggttgtcaaaagtgcactcacatgcatgcagcagatcccttatttcaagcaaacgcagcaggtgcaaattttcacccttcttatatcttctctgcaaaatgaagaaccagacacacagaaattgtttccagcatattagcagtcaacattgagttttctcatgactaggaattctctgaaatacgtaggcaaaaaaatcaaggaaaacagcagcggaactttcaattgaatcaaggagagcagcaggagaactgtctagtttgggatatcagttgctgaacatacacacccgcctcaacaagcaggtagaagattgcagcacacaaataggtaactttcaaatcttctgatgttaagttccataatcacaactttctactaaaagcaaaactcgatctctgatattgctcctctgttgttatatctaaagaggaagaaatcaatcaaaggcttagaaacattaacatagagactcatcaagacaaccaagacgtactccacctacttttttctctacaagatgatttgccacttcaacaatactccagacaggtataaagaactatctatttttctttttccatgttccttcttattgtttctttcatgtctcgtctttaactttacataaagatgagctccgacattccgtatgacgatacatagaccgattcttttatctttgcaaaattgcaatagcattgaatattctttattcacccaatggcagatatctataactgaggtacaagataaggtaacactactgctattatcaaagccaccagtagagccacttttcttcctactccaacagctatacgatcatccatctaacaccaacacagaacaaaactacgagatcatatgggttccaataccatcatcccaaaaatggacagacgaagagaaagaaatcttcgatttctactccaattccttaccatggatctcagtaaggcaaccatggttgatgagctccacaatactcaactttttcaaacaagaatggcattataaagataacgaagcaatgttggttgttatcgattctaacgggaggttcgtcaacatgaatgccatggatatggtgttgatttggggtgttaaagcatatccattctcagtttctagagaagatgagctttggaaagaacatggatggtctatcaatctcttgcttgatggaattcatcctacatttgaaggaagagagatctgcatattcggaagcgagaatttggattggattgacgaatttgtgtcactagcgagaaaaattcaaaacctagggttccagttagagctgatttacctaagcaaccagagacgagacgagcgagccatggaagagagctcaattttgttcagtcctacattgcaacagctcttctggctccgattagaaagcatcgaaagatcaaaactcaagcggattgtaattgaaccatcgaaacctgatcgtgtttttgaagaagttaggaaccttctcgacttcgattacgggaaacatagaggttggggaatcattgggaatggatcaactgcggagacggttgatggagagaagatgacggagaggatgagaaagattgtgcggtggggagagtatgcgaaggggttgggttttacggaggcgattgagattgcggcggagaagccgtgtgaactgagtcacacggcggttgttccgtttgaagaagcgttgacgatgaaagttgtcacgtgcgagaaatgtaagtggccaatgaagaggtttgttgcatatcagtaactcacagccctgttactttattcttacctccataataatatgtttgtattttatttatgttgttgcttcgtttaaataattgattcaattctgaacatggaaaggcaattgttagatttttggatattccaggcttgatttcacaatcctctgtgatatattttattgtataattctttataacagtttgctctattcctataaagctaacagctctagttaacagttaaaaaatttgtacagtttttaattaccaattagattcgatataaaaagtagaaaaaaaaaaagttcgtaagactaatccgactccaaaatatgaaatttcatttatccggaaccgtagaggaagagatatctatatggtcaaagcgacacgtggcatttatacaagacaatccaatctacggtagtaaggtgtatctttccgcactagatccttccccaataacacatcctccagggcttcatcgcgcgatctgcgactcctctctctctctgttctgagaaacgacgacgagaagaagaagatttagctgacgaaaactacaacaacaatggtgaaggttttgacttactttgggatgacattggccgctttcgccttttggcaatccatggacaaagttcatgtctggatcgctcttcatcaagacgagaaggtttcgattctctcttcctctctctgccctagtgtgaaatactgaaagctgacactttcttagtcttggttttggtttgaattgcatggatttcgagttaatgtgtcactggatttgggattgacgtcaaatcctaggttatcgagaattttgtataatttgtatcctcagaattgatcctaatttctcgattttaagaaatcattctttttggttcgtttctcatatgctaatttgatggtagagcgacatagaatctggattttgtttagtggcttttgtgttcttcactctctgcaatgttcttattgcctagcttcaagctttaccttgattagagcacttcctttgactctattagattatgcaatgttggattatgtagataaacaatttctttggtctatctgattacaaactttgacagtcatattatgaagataagatgattagaggcttaagcttaacttttgtttgattgcttggtttaatgttgatatatgaaagcacaaatagagcctcttatcatcattactagttattcgaaaagctttagcatgatttgacttcttgttaagaagtgatgattagaagctaagctaagcctaacttgtgtttgttttgtttcatttagttttatagaatatgaaaattaaagtggtaatctgactacataactgtaactacgtgtagcaagaaagaatggagaaggaagcggaggtaaggcgagttagagcagagctgctacggaaagctagagaggaggatccacttgcctgatcttcttctgcagtcatgcttttgggtgtcttaatcatatcaattcacttctcctgcacattttgtctttactgttatggaccaaaattgagtttgcataaagtgacattaccatatatgcttttgaatgtgggatgatgatgaataattgtgtcttttgttgttcttcttaactaatgaaacaactagtggagaagtttcagcatcttgctctggttatgttttcctcttaactatgtatcattgagttcgtgttcatgcacaagtcaagcagatttcagatgtctgattcatcagaacagccaagattgagcttagtaagaactagaatatcatacttagttttcattagaccaaagtttacaatcaatcgatgtaatatgattgaaccgggttaaacaagagaagacaacaattcaaaagagaataagttaaaacatttcagacttctgggtgttgcataatggtctattctcgtactctacttttttaagtttgttcaaaaaaacttcaaggttgttcagaaaatgatgagctttgagttgggacttggtgctgaattctgattcttatgctaccacatttgtgttcttcaatgtttgcatcaccttcctcctacaaaacagaagcagaaagctttgtttaattataacattacataatcggaatatcacactgttaatgtccctctttatgtgaatgacttacctcttgtaagagatatagttctctatatctggtttctgctcaggcttaaaagctaaccatttttcatgtgaacataaaccatcaaatgttcctagatctgtgcattaataagattcagattaagttactaaacagtaaacacatgcataagaaacataaacaaagagtttagtgaattttaaaccttggagcaaaaactttggttcttcatcatagcagttcaatttccagagaacaagaccattatcttccaccatgattggttcagttctacgcgcatcacatatacgcgtcactgcaaatggatttcatcaggttaaacaaacaaaaatctaagacaacgtttattagtcaattaaggatttagacttacttccagatgttatgccctttgcctccatcattccatcatgagcttctttagcttcagctcttatttgagacagaatttcattgtgttcctcaatggacaatggagctccgtttttcttcataatggctttggcaagatcaccttgcaacttctgtttaagctgcttctcctataaagacaaaacgagctttagcacaaagagttgatatataaatccatcttacagattttagaacataccttttcctttgcagctgcagcctttcttttagcttcgttgttatttgctttacactctgtactctggctcttaatgcaattcctcattgccctggaaaagtttaacacgtaagttgactcataaagaagcataaactacaagaaaggttgatattggcatataaatatacacataccaagtgctaagtgattcatcacatacgaagttgagaagcttgagccttcttgatgcatccatcttctcatactcagcaacacctgtttcaaaagtttcaggtgggaactcatcactcaaaacttctgactgcaataggatctctccaagagcagtgaaccaattgtcagacacacttagagacaaggacctgaaaacaattcaaatgcatcataaacaggagcaagaaagaagaaacatatcgtatgtatacttcagaacagaataaaatcagtcatacatctctctatcctttgatattaaatccaacaattggatcatcagctggataatagagcagtattgttgtctccttgtgttacgcccacatgagaagagctcacggacaacagtttcagcttgtccttccttcaactcaagagcctattaggaaattcacaatgaatcagattaagagttaacaattacatatctttagttacttaccgagttaaagagaacaattaccatacctttccaaaggctgagcaaaactcgaaaagctggaatacatttccagcttcttcagttggtataacaacgcctgacacagaaatcaagcttataccctgaggaagttgagcctcaaactgaatctcctctttcagcttgtgagtggcattggctttcttgctcttgcccaccacttttttcttatccttggcaacatcttcataaccaaaaacatttagcctctcctttctattaagacaactttcacataacaaaaactcttaaattctcaccagctacttcaacatctgtccccgaaacagaatcactattgccactactaccttccatagaatcatcattctgcagcagaaaccatattgatcaagtaagcatagtaaaacatttaaagctaagttcacaaaaatcaagatttgtgtaattgttttgagtaccagttttggcttcttctgataagcaaagttatcatgcccctcaacttcaagaagcatagatactgaagctaatccactagctttagctttgtgtgccaatatcccggtgggatttagtcctcgtttcttcctgtaaatcctcacaaacatttaaaaaatctctctttaaatgataaacctcaatctcaacagaaatttaaattattacctgcaaaaactgcaattgcagatgcctctacactgaggacatatccaatcatctaacttcgctacttcttctgcattctcaccatacctatgattcaaatccaaaacacataagctcaggaaaattttgatgaaagaaaaccaataaacacgaaagacacaaaacaaacctgtttattaaacacttatgacaaaaattaatggtacattgcttatccttcttcatagccttgcaagacgcaacgaagtccatagtcttctgtcgacactgcaaccaaacaatcaacagcatttgtccaaaaatcgaaactttgatatcattaaccaaccaaaatcaagtctttagaccacaaacaaaaatcaagtctaaatccacaaacaatctcaaatctaaagccacaaacaaactcaaatctaaagctacaaacaaaatcaagtctttagccaataacgaaatcaagtctttagcataaaacacacacacacacagatgatggatttgagggggaaattttgaaataacctggtgacaggttttgccattactggaatcgtagattcttcctccgacgactctaacgccgggattagtggtacgcttcgatggtttctctttctcaccctcaatagccattagaactgacaattacagtgaaagattcgaactttgagaaacaatagagaagctgaaggactatttagaaattcgaaggatttgagaaataacccagaaactgaatcagagagcaatgaagcaatttttgcggaatctgtgaagtttttatttattttattttccctcttctttaactaggtaaataaattcaaaaggagggataaaaaaacactgaaatatgaaaatgaccgctgtgtaaaaattctcttagtttcctctttacaaatgattgggctattaatgggcttcattaattatgggttcaattatattatttaaaggattgggctattactgccaattagtatatttccattggtatttgatgtaatagttaacacatttatgtaaattttaatgtactctttaattaatagtatagagatagcaatgttatcaattaagaataatagcataattgtatacctatatataatcttacatattggtatgctaagattttctaaactttcatgttaattatgtttggccgatatgattgtattgaaccgaagggatatgattctaaaatagttttgtggcgtgtagtctatgagtttataatttatgtaaggcctaaaacggttttatggttcaaaggcacatttgaattttatttttgctctagcagttttcgaggttgcatgtcatatagtaggtgatagagtacaacgcgcaatcagaaatttgtgaacaaaatagcctgaaaacaaatatatagggaaatatcatataaagtttccaaaataaagagaaagacaatgttattttatttatatttttctttcttttttttaagatatagaaagtgtgagaaagacaatgttaaattgataaatatggatacaaaatggaaaactaaaaagagtattttgatgtggaccaaaagatcaacattcaaacttagaaaaatattagcctattaggccataaaaatcatatgtgttattcatttaaaattatagattcacttcctttttggctaattcactatggaaatgcaatatataaataatatcaaatagctaaaaagaagtacatgagaaactaaaagtaaaaaaaaaaaaaggagagaaaatgaaagtgttgaagagagattcgatgttgttactcataacactctatttcttgttgacaacatcaatggctcgtcaagatccttttctggttggagtcgagaaagacgttgtcccagctggaaccgatctaaaacagaacaaggcgaaacctcatcttcctaatttgtttcgaactatgagaagagttcctaccggtcctaatccattacatcacatttctcctcctcagcctggaagtctaaactatgctaggaactgagaaacttttaaacatcaaccattgttctagatcaatttatgtttatcaaattttataagaacgtcattgattcatcttctaatgtcttcttttacttgataataaaatgatgatttaattttattttttagtgtggttattaaatattaataatccgaattgtggaacatttatatataaatcgtcttttaatagtggctataataatcttatatgtattggtatgctaacattttataaacgtcaatgttaattatgttttgccgatgtgactggctgactgaattgagccgaagtcatatgagtttataaattttcaaggccttgattctaaaaagaattttatttatgctctagacactagtagtttcgaggttgcatgtttaagtcataaacactactactatttgcaatcatggaaaattacgcaaacttttaaaagagtgatacaaatgttttttttttcaattttattaaaatatgaaaatctcagaaacaagtgttgtgaaatgtggagaaaagtcggtaaagatcatatttcaggaatttatgttaattagaaatatatggttatgtaattatgtagaaggaaacaagtatattcaaaataatgtattaattcgttttgtttaaaatttatcattcccaagaattgtaaaattaacctgaacaagcaaaaaaacactcacatcaccaaaaaattatcgaaaaactagtgattagaatttagaacttttggtagtatacttttttcaaagcagtaaagacatgtgacaagatttatgaaaagttaaagtctaaggtgactacgttttttaattgataaatttaggaagagctatactaaataagtggtttaatcactcttttcagttaaacaacttaaagaccatagcattttaataatatagtgatagagaaatagaaagaacaaaaaaacaaaagacaccacctaaaactgactctcttttttctgtacaacctcaagttttgatgacaaaaggttcttacatagcatttgtacaacattaaagttttgttttctaattaaaaaaagttgccaaatacttcaatacaaaagttgaacaacgttttacatatccaaacaaaacccacaaaaagaaaagatagagagagacagagtaagagagagatgaagaagaagatggttatacagaagatgataagacatgatggatacagctacgtattatatagatcgccgcctaaaagccgaaaccatcattaattttcatttactgtttctcctccttacgtcatctcaaacgccgccgttttcgattctctcactaagacaaaaaccacaaccatcacttcctaccatcttcttgtcggacacaacaaacccgtctcgtgacttacaacatctgtcttcatcatccactggtttatcccaagggtcaacaatagccacaggctccggtgacaaccgtccatcacgcggcggcgagaaaacaaccggcatgtactcgtctatctctactcctgctagcctaacgttcttgaaatgttcccttaatgactcaagacccttataaaaaaaacagctttttattattccagcgtgactaaacaagagattcatgaagatctttcttgtttttctttacctggatacgagcataagtgacctcacagatctttctagtggtggtgaaatctctccaatgttgattgtgaaagctcttgtaaagtctccacactgcttctggtgatgtcatgttcacaaacccatatcccacattgcttttgttgctaacaaaacaccaaatttaattagcacactcatcactaatatactattaatcacatagaaaacgggtaatcaattaattacctgaaatcaatggggaggtagacaaagtcataagaagacataggagttttgttcccttctttgattacactttggttacaatctttacaatgtgtgtccaacatcttcaaaagcagcttctgtctgtaaatagaaacaatactataaaattgactagtcgatatttgttaatctccatgggaccagaatatacacaaaaatagtaaacatatgaatacaaatagcttgttctcattactattatccattaggtcttgttgactttttgtcaaacccaaaaatcaaaaaacagaacaaaagcaattcctcgttttaggacaatatcggactaacaagagaatcaagaagcacatgcctatcacaatcactaagctataatgaaaaagatgcatgcttttttttttacttacgtgtacttgttagggatgttcttgatcatcacggtggttcttccgtctctgaactctccgccggtgatagcgttttcgtttatcatgaaataaggatcaccaagattcttctttacatacttcttcttcttcttcttttgttgttgcttgtacattagaatatccgacttcaccattcgtgatggtggtggtggcggtggataataatggtgttcgttgttaaagatgaagtttttatggaagtgtgaagcgaagaagagtttcttggttaaaccaccgggacgactaaactggataaccattggtttaccggagataacttttccgttcattacacggagagcttttgcagcgtctctaacgtcaaaaaactccacaaatctttgttctctcttacacggcgtctctctcacctgcttcacttctcctacaatgattttcgtaacactaattagcataaagtttgcaactttatttgtttatctcgttaaaaattgaaactttaccataaacttggaaaatgtgacggagagttgaggaagagacggtgggttctaagttcataatgacaagagagccttgattgtttccttcaggaacagcattgagttgaggaaacacgaaatgggcccaaagagaatgaccggagacgagtccacgcgccgtcgtgaagtggaaatgttgttgttgttcctgttgttgcatgtgacggtaacgtatctcgttaaaagctctttgtgagtttattagattgtagaaatggaaaatcacgattccttcatgtgctctttccatttggactccacggacttcaccgaatagttccatgtctcgtcttagagatgtctcagtgacggtagctgggacttgtaataacatcacggctctggttggtgttactgaagtcggtggaagatgaggaggaggaggaggaggagggagagagaaataagaaaagtatagcggcggcggcggaggaggaggaggaggagggggatgagggaggaagaatcttgtcggaattaaggaggggttttggttttggtgttggtttatcgccggaaagaacgccggagctgttgggttaaggtttgttgggtgactgaatggtccggtgacagacattgttggtttagagggagaggtgatgagttgggaactggtttttccggtgacaggtaatgactatggacgtttgatattcttcagtgatcgtactatttcgtctctctctacctctttatttggtgccaaggggagggagagggagagagcacaaaagtggaatttttgttggttttgtttttattctgcagagatttctattattatttcccaatttttgtttactaacaaaacaagtcaaggttctttaatttaatggtgtactaactcgttcgagcaatttaccattttgtcctttgagagggtttcattgcaatggactgatggaaaatgcagagtattcaaacaattgtagaggtttttttgttaataatcacgagaagaacataggttacataacaaagtctcattcatttttctatgttgatttagtttttaagataatcaaatcatgtttttctctaaaacattatttacgaaagaatttttcttgtttaaaacaaatatcatagttagattttatgcctaggaacacaattttcgattagttgggtaccattatccatgtatcatactatatagaatttgtatttgggtgcaatagttcgtaatgtcgtgttccccaatttcaccgcaaaagtgcatgggccgatttgtcgtgtctctctccatctcaatgcaaagtgtaaactatctaagcctatacatttctaaataatctgtagtattgtttatgttccataaatgtatagtgacaacattccttttgacgtaaaaacaacgaataaatctcacccacatagacattacattacatttagcccatattagcctaatctagccttttgtttcatagatttttataagttttctacaatctcctatcacaaaagaaggattagggaggccctctaggtcagatacgtaatggtttggagctatggagtttgacatacgtaatatctgtctatgtacatataataaacgcatgtcatgtaaatatagttatagttcgagggtaggaccaaatagggaccagggcaattccttgttttaaggaatgttattgttacctacttccttgttttgggctgtcatttgtttttgtcatgtttataccatatccttcatttattacataaactacattctctagctaataataaaaaaagtgtgaaaacgtgaatatcttctatatattatttcagaattcagctacaaaagttaagaataaattatgaagaaactttgttgattcatcatgatgtgatcataatgatgaagacatgaagttatacttcaaaaattttatcaacttttggttagtaaattattttagtgattttttatgtgttatttattcaaaatttaaaatgaatgtttatatgattttccacttttaaaaaataaaattgagaatggttggtatgcaatgagccaattagtgattgaaacgaaatatcaaacttttatttgttcgatcccatggttacttgaccttaccacgagaccggttgggctaatgagagtaaaagaaaaataggcatattgggccataagccaaaggcccacgtagtgcatattattcttagctctttcttcaaacaatttgatttacgaatctgccatttctaacgatttagggttttactcagtaccatgtctcgaccgttttgaatctcaaatcttaacactcttcttctttgagctctcaccttttaccatccgagatctgtatcggatcgaaccgccgagagtgaagaatcagagatggctttggctttcgatgagtttggccggccgttcattatactaagagagcaagatcaaaagactcgtcttaagggcatcgatgctcaaaaggccaacatttccgctggtaaagcagtggctcggattctccgatcctctctcggtcccaagggcatggaaaaaaaatgcttcaaggacctgacggagatgtcaccatatgttagtttcttccttttgaatctcatctctcttaggtctatccctatggctcttgctttgaacagtggattgcagcccattgaaacactctcagctgtaaaatctcagcaaattaaggtaagtgattgatgtgttttgtctttgtttactttatatattggcttgttactgtgaaagatgggttaagtattgggtttgttgttgaatattcaggagaggagaacattccattctacgggattgattgcaacgatgtaggggctaacacatgagggaacaaaacatgtttgaaacgttgatcatgaagcagcaacagatcgtacttgcaacacaagtagttaagataatcaagatcgatgatgtcatctccccatcagaatactgatgaatgatagtcatgtttggattgtttacgttttcttgcaagcgtatttatgtaagaacattccacagataatttttcactgtggttaggtgtgctgattttgaatttattaagcttgcggttttctttcgacattagaagacttaagtgtattgattcagggattgagttttgattggtccctcatgttcaaagcgatgaacatttatgagttaagaaaaataggactgttagaggttgatgaagttgaacattaatggagctgagtaatcattggtttgtattttgtaatgttttgatagtaaaaattttggtgggtcgggttaaaacgtttacatgcgtgaaagtcaaataacgttctgtaccttttgtctactgcagacagttgtcatgaatgcttcattatgcttctttgtttgtttggttaaaaccaattttgatcatgtttggatcttgacaatgttgcattttgatataacatattgtttttatataactataaccgtcggtgatccgggtcagcatcgtattagggatccaaaactagttatttaaccacatgatccgacttaagccgttcgactaatctcaaaagcagttgttcgactaatcttaaaggtgagtcagttctactgaaaaatctactatctaataatggtcgtcaaatattttgaaacggctatgagtgtaagagtctactattaaagcatgttgtttgaatcataatcataatcaaatctgattatagttagttgctcccgaaaaggaaattagttcgttctctagcacttgcgcatttttcatcttcaaaacaccgattttgaaagttactatatttgacatcttttttgaaacggcatttttcaaactgcagtaatgtagtactctaagatttatttcacatttgtaacaacttttttttttttttttatatcttagttttggtttgccacattttccggttcatttttagtatatagattttatttttatcttacactctgttattcggtaaaattcgcttcactatcatttttactcattactgtgttttattttcttctgtatagtaaattatctatcgtaataatgtgttagattaaccaaatgattagctacacacttgttcgaggtagttttttttttctttggtactgaaaaacttgcaagtgtgccatcatttggtacacggtgatatattgattgagattcacttaaagtgaaacatgactcttcttagaacatgttacgatgaacgtgaaggttgtgtcccattcctaattccaaaaaaccataactatccacatggtaccaaaacttccaaaattagcccaaaatcaacaaattaacaaaacaacagaaagagataaaatagttctccaccgacaaagttgctgataaataattcatttgtttactcctacaaagatacaccattgcactcaaaattaagtacttatttgcaatggtcatatgattacaattggattatagaaacatttaatgtacattctgagtaactttgaaaaactgcagctcctcatttggattttggtaccttatcatttattgcaataattgtccaacgccacgtctcgggaagggaagagagcaaagagcgagatccagatctggtccaattagtggagattctgttctagttttgtcagactcacgaaaccaacacttattacagatcttgcagacaaattaaatgtcatcgcaaaaattagatatgcccatgttacacactgcgaccaatgtaaccatatgtgaatatattctctaccactactatatgccacaaacatagttcacatattcaactgcaatatacaatatcctgtgattaatttggtcttcggttcgatcttttttaataatcagatgagaatttaagccgaaattcatatactaatctgcgttgtctaaaatccgaatatttgctattttgggcgtctatagtgacaaaaagaaaaccataacgatttttgtggggtggtaaaaatttgatcagtggccttgaaaaacaaaactagtcttcaacccactctaataaaccattgaaccatacattattcgttcggctcggaccatattcggcacaaaccatacgcattttggtttgattcggttcggtttgaaattatgctgagttaataactaaaaaacatctcaaaactgttaacacacggatgttaataattaagatgttgatacaatatataagaaatcaacaataatcgcttagcaattgtacagacattatccccaccacaacataaacattggtccctactccaaaaagttttaaagaaacccattggtccaaagggaatccacacataactttagtatacacatcgaatccatcttactactttaaccctccccacaataaaaaaaaactaaagggtaacgaaaaattgacataccagggacaacatgcatcctcttctttatctttttaattaattagattggatggattatatatataattttgaaaagatggattggattaacatcgtgatccttttctacaaaagagtgcaccagcattggacgtgactgaagccaccaatgaggacggtctagccgacaaactcgaagccttagcatagcttgaagaggctcctccacccgaaggcgtaaaaaacgcaccgtttaggaacaaatcaccttccgatctccaattccatttcttccatttgcttcgtggtgcatcttcgtatttagtcacctttatattatatcaaatcaaaaagttggtttggtcagattaagttgaatatttctcatatgactaaaaatagaaaattagcttcttaattacctctttaaagacatggtcgtttggagcaagaaacctattgccttgactgttaatcgttggagctgcacttccaccaattgcatacatttgccaatgtgtataatcattattcaccacatgaaaatatccatgtctacatctgccaatttcccaaataatttaaagcgtcttagttaaaattaatataaaaattaagggacctttttagcaaactaaactctatttttaatttaccttggcattctctgaacaagaccttctccaaagtgattaaaggcaatggtgacttgcatgttcttgtctctcgtgtacgaatcactgtgtcccaaaagcatgactttattgtggtgactcaaatagttattagagatagtaatggccgttgatccatgaatggcgtctatcagaccgtcagcgcagttggacaacgagcaatggtctacccacacgtgggagccaccaaaaatcgagacggcgtcaccgtcagacgctgtcctccacccataatgcgacggagagtctctaacgtaagcattcccctttcttttacagtcatggatgttaacaccgtggatgatgatgttggtcacgtactggacggtgatacacgcgccaccagcaatgtggacgctcgctccacggccgtctatagtcttgaaagagttcataatcagctcttcttttagttttatgaccatgtcacgcgcgaagatgatccatagtggctcgtcttggatcaccgcgtgtctaagggttccgggtttagggttaaccacgtctttgtcactcgagtcagtcaccacgtagattttaccgtcacgaccaccgattgcgtgtttgccaaacccgatcgcgcaatcggctaaccgttgtcggtttttctcccatttcgggtcgcatctccaacagtcgtcaattggatttccggtcccacatgagagcacgcctagattcctcctagacgcattaatctttctacaaatatatatacacaacaacaatgttataatgccgatgtttaacaatagtataaaactactacttttaaacattgattgttacgcactcgttaacttcttgaactacgagttcgggttcggagacgggagtggaggcaatgaaggtcggagaaaggacaaggaggagacatgagaagagggagagagacaagtgaacaagtgtcattctcattcttgtctctcgagaggatttttacttatcaatgtgtttatgagatttgaatgtgtttgtttgtttggtgatgagagaaaatggtgagaaaggctttggcttctttataggaaaagtcccatccccttgaattcttggtttttaattattgaggacccactcttttcagattctattaaggctctgttcgtttcatcattcagatggatcatctggatggagatgagttttgatgttcgtttagtgcaaaaaacggttcattcagatgatccatccaaatgaatcatttggatgagtttgaaaatttaggctaaattttgaaactcatttggctgaatttaattggatcatttggatggagatggttcagtcagaattaacaaatgacaaaaatatcctaattattttaattgattatttagatgtatttttagataaaaacaaatagacttaaatcttattttccaattatttttttaaaaaataaaaattaaattttccgctaaaaccgcaaaatcaaaattttccgataaaaccgtaaaattccgttttcccgctaaaaccgtaaaaatacgtttttccgccaaaaccgcaaatcgttttttcccaccaaaactgtaaattttcgtttccagccaaaaccgcaaaaatcacgttttctcaccgaaaccgtaaaatcatttttccccgccaaaatcgtaaaatcacgttttctcgccaaaaacgtaaaattacgtttttccgtcaaaaacgtaaaattatgttttccgccaaaccgtaaaatcgagttttcccgtcaaaactgtaaaatcacgttttcccgccaaaaccgtaaaataaattcataaatgtaaaaaactattatttaaaatttatttacttttaaatatattttaaattaagaattaaaattaatatgtttacaagtaataataaaaatataattagatgaaagcattggtattttaggtatttgtattattacaaatcatttggatggagatagagataagcaaacgaacaacatctcattcggatggtctagttaaatgaacctactaaaaatgaaacgaacaagagtcgaatgaatcatctagatggacatgttgaatgaatcagttggatggatctgtcaaatggagaaacgaacatggcttaactaaaaagacgaaaatgttttaaaatacatacatattgaataattaacttgattcattatataattatttatgagaattcttgtgagcttttaaaattagtgttttattatagcattatttcaccaattataaaactgatatttagcaacattatagatgaacattgacttgaaaaagaatcgagctttaagttagaaaatttttggtcaaatgtttttgatattttaagcacatatatacatatgtcaagtggataatataagatgcatacttgaagaattaaacttcgataaacaaaggtgatgtctcttaatataaggatcatagtgtaataaaataataatgccgaatttgctgcaaaattttggctaaaattaaggacgtgatagagaatttcagtttaaacgaaacttataattgttgcaatgggcgcaaacgaaaaggtcactcagttgaagagaatggatacatacagttacaccattaaaattttatgcaactctttataaagatattcataccattaaaaaatggtaagatataattaattcattttaaggttaatcatcctaattaacaattcaaggactatgtctaatccctaataaattggattatttgcagaattgataataatagtatgtcatataataccttatctatatctataataaattggagtatttgcaaaatctgacataacataaattcaaatcaattaaattttacattgggttcttcctcaaagttaccaaaaatataacgaagtcattgattgaagatacagatgcgtcatcgttaaacatatacaagatgatctcaaaattttgtttctttaatgattcaggaatttaacgtacgataagagttaattcatgatacacattgataaacacacaaaatgtttaaactaccacgatatgacagaaagtaccgtatattcgcaatatagtgaatgagttatgttacatgaaacaatgcaataataatctgttaaatgttaactgaacaaaaactttggtacgtgtatattgtctgcagatctgcaatacatgtttacttagctattgatcacgtgtcgtctaccatctttagtttcttttattttcgaagcatcatcgagttaaaattaatgacaccaaaacattatactatagctttcaaaatacaaaatcagaatcgtttacatttgtcggtctatagaaaaatctcgaattatgttttctgaaatttccctttctaaatagacaatacattgaatgattaggagttaattagggcaatggattaatggacccacctatttccccaccaattattattgactcacgaaattaacactattcataaattaattagtttctgacaaaagtactacttcgtaggacacatcagaaccggtttcagatccaataatcggaaaccgattatggtttttggtccaaatcataaaaatgggcacgttcgtccatgtgagcctggtctggctacacccctgcattcatgactctcatctcagccgttccttacccccatcgtcagccctccgatctccggtcagtctcgcgccaccagccgtagtttcttagtttgatctaatttttaaacatagcagaatcacatcaccgtcgaaagtgaaacaaaatctttggaatgagtttctggaatgatggttaatgatttaatggatattttttcttaaatcagtttcatataatcacaaaatagaatggatgtgtaacttgtaattggtaataacgtgtagtattgtggaatcattccactttttgcgggccactcactaatcaaaccttttattttgggtatagtaacgtattagaaactagaaagtgttaaaaattacaaagaacgagaaaagatgatatcatttgagataacaaaactcaaatgaaatttttttccagtttatcaaatgagagacctagggttggaaaattgatattttgtttaaggtggactaaaatccatatgagatatcttgttttccatcatgtttctatcatatttccattaattatttgacatactagtgatcaccaatatcttatcgctaattttatcttgtatattattcatgttgtaagtacaagaacagtagaattacatatgttttaacatggtatacacaccaaaaaaaaaaaaaaattgcatacacaccaaaccaaaaacatactttttcactaaaaataatttgtaagttccaacaaatggttttatgcaaatattaaacaccaattaacttgctactatagtttctagtctcacctcaatccctaaagatcacactcgtgactcgaccttatgacacacgaaattgtgcaactcttgtcacaactctcactacccgtaaagccttcgacacgctttctagatacgctttctatgttcggcacgcacataaggagaaccctcatgatcctattttaattaccctcagatttacgaatatttttcatatgtttattactaaaaaacttttgatttatatctatgtaatatttataaacttatatgtctatttattttgtccgtctatatagttccctaatttctagtaaacgtccccctataaactaatgttttataagagttagaaccataaactaaatttctaccgtttttccataatgtaacaaaatacataaagacctaaaagtctaaagtctaccaatttcttggtacgctagcttaagatatacgtttaatgtttttataatatactgcaatacattagccattttaagaagtctagggattgaattctcttagttatatatataatcaatttttaagtaagcacatgaaatttcaattttggacgatttgtttacgtccttatacgtacccgaaaccgaaccaaatgcattctaataattgagatatacaaataattagaccaatattctgttgctgaataatagaacgttaaaatgctgttcatatattagtcgtagtaacgaactatagattaaaacacaaccattaaagtatatagtatggacattatatggaaatatagataagagccctgaaaaaatggtgacaataaaagagggaatcacatggccttttctgaagccatgtgctgatcatgatagcttttatataatcatttatctcctatcgttatttgacatttcttaccatgaattcttttttttttccccaccctaaatattgtagtattttggtagtataatattagtgttgacaaagtgatatactagcatttataaaagcagctatttgtgttcttgtgagtgtctaatgagtaatgactagttaaattgttgttgcccactttgttcggttatcaaaagtcaacattttaattactccttatcaatcaatatattgattatcatctacttgataatcattacggttgtaactaatgtgtcccgagtcacgcgacgagccattaacttttgtacactccacaacgtaacactctttggggataattttcatgatccttgctaattttacacatcacgagattgtacaattgaacgaaacttaggttttagtgagagtttagataaataagaaatgttcatattctccaggtttcagtatatattagtttagttctaatgcaaaaatttatttcaaagtaccaaagtattacttattactatataaagatcaacaacttgaaagtagcaacggaaatttcgattacataatatattttactttaggaaatgtcaaacacccatatgataaaagtatgggatccataccaaattataattgtccactctaatgattaacctttgtaatggtctatttagtaatgatctaacaaacatcaaataatctttttaacttttaccatgattataataatatagataattgtgattataatgcatgtggatactaattttgtgatttgagttcttgaaccgatatctcctatgatttgtattttgtgggaattttcttaccagaattccttcaatcaaaaaagttaatgggcttgagatagtttttatttgtgagtgggcatgtgatacaccccttatattttcagtttcgggttccaatttgtcaccaacctcaatttacaaaaacgctaaacatgtaaacgctaaattatccaaagacacaattgcaatcaatctaataaaagaaaccataataattttaaacgtcattttaccttcctattactatgtacaaccacttctttaaacatgaatatcaagatcaatggtgatgaaaacctaaattaagaagattttttttttctttcccaactctctaagagagatcaataccgacgactttcgctggttcgtgtagattttataaaacaaaaagcattggttagttaggagattttgattcaaggtttttttatgagaaaaatggaaaattatataaaaacaattaatttttcttacttgaaatggacaaaatttaatttttttccataattactttaagtatagttagccgaatatcaaaacatataaatagaaatagcattgttcttatgccattcttatattttcatttttagattatttttttttttatatcttttttgtttttaaaataaaaaattgaaatttattcttcttacgagagattgttttaatttgatgacaaaaaaaatttgctttaacttgttttgtattaaagtaaatacatagaaattaatttatggtaacaaaaatgttacaacaatgaaatataattatatttgaactaattagtattctagacatgaaacatatatatatattaaacataaaattggtttttaaaacaaaataatcaaaacgatttagttttaaatcattgcaatatattcatatatggtttccaataatacaaataaactacatagattataatatttttctttctacacgaaattataatgtttagaatcacacattagattccaaaaacgacttcatttttattttcactgaaatgctaaaataacttcgtcttaaaactatacattgcaatttatccaaaattataggatttttcttttgtctgtaaattacaataatttatctaccgtaaaatttcaatgaaatttacattataacctcttaaatcttctttttttgtacataatatattagcctctcaagtatattgaggaaaataaaatatttaaataagaccattgcagatgccaacatattacttggattgaatattgaaatataagtcatttattgtctttatgacataaaaattcaattaggaaaaaaaatcaattgaaatttgagaagggaagtgataagaaaaagagagtaaggtgatagaatcagtggctcaaatcacaccaaaatctccaactcacttctcattggataagacaactatcaagaagccttcaatttccattggtcctcctctctccttctataatcccaaaaaccatctcacaaactcatcaaacctctttctcatctcatcttcaagccatctccgatcatcatcagacaatggcagcagctatggcaacagcaaccaagtgcatgtctctaaacccatctcctcctaaactccaaaaccaaaccaaatccaaaccattcatctccctaccaaccccaccaaaaccaaacgtctctctcgccgtcacaagcaccgccctagccggagccgtcttctcttccctcagctactctgagccagctttagccatccaacagatcgctcagctcgctgcagcaaacgccagtagcgacaaccgtggcttagctcttctccttcccatcgtcccagccattgcatgggtcctttacaacatcctccagccagctattaaccaggtcaacaagatgcgtgagagtaaaggtatcgttgttggtctaggtattggtggtggtcttgcagcgtcagggcttttgactccacctccggaggcttatgctgcggcagaagcggcggctgctagttcagacagcagaggacagttgttgttgattgttgtgacaccggcactactttgggttctgtacaatatcttgcagccagctttgaaccaaatcaacaagatgaggtctggggattaaaatcttatatatatataatattattataaatcatctttgggattcaaatgtaaaattaatcctttgttttatggacagttttatgtttacatttttggactaatatcgtttctcttatcggcataagtactatactcaatttcaactgtaactaggttagtctgatgatttctagaaccacaattctagtagtgcatagcttcagcttctagccttctaggggacttggagttggtttaagtaatgcgaaacgcttcctccagtgttttagatcccagatggctttaacaggaggaatgtaccatcttttgagaaattatatcaagaacccatatctcaaaatggactttcgtacaaactcatttcattgacctttctgatgcatttcattcacctcctaaaatcaatcgtttcttctttttcttaatgctcataggtcacatattgctcttagctcgacctaacactttctttccacaatttgttggacaatatttttgttttcaaaccagtcacatagtatgccgttgggtaaataatgcgggtatggggccggtacttatatctgacctttatataagctttttccgagacggattcaaatcggatactgatcgaagacgggtcatgaatattatgtccagcccctataactaacaagttaagttaatggccacatggtttgggtgcctaagcatcagtgaaatacgttacttatacctgtcaacgtgacataacgtctgttttgttttgagttaaagattaccaatgttaccgttgactatggcataacagcgacctatagaggaggcattattgcgaagaaccttgaagagacgcaaaccataagcaaaaacacattcaatacaacactgcttaaattaataaatagaaacagaggaagtaaattattcgtgtacgttagggtttttaatcttaaaatataaaaaacttagaaaactaaagagtacaagtcttacaaaagattcagaacagaagcttttcaagaaaccaacaacttcagaagaaggaaattcttggtagtaacttaaacctggaagattcattctttcttcatggagtctttttggagacccttcttccggatctggaggcatctcttgatgttaaatgattcaaaaacgctttcgggcaatgcagagacaactgcacccatgagagcgtgaggccagtacggtgtgcattgtgcttcatagcctacaaaacgcagtgctgcctttgcgtaaccctctggtgatgcaactaagaaggatgctcttcttatttttgtcatctttgttgcaacatacaagggaacctataaaacaacactcactcaattagcggtacaatcaagatttcaaaaacttattgagcagtgtgacccaataagttgttttggtagtatacaactccacagtcagctataacatacatggaaactgccacagatcagtcaaatacaatctctggcataactattctacatccgaaaatggttacaattaagtatctaaaattcactacacagattgcctagttttctagttttgacattctttcacaaaatcggcctgaagaaacaatcagaaacaagatctcacatcatcgaagtattcaacaaagagacatgtgatgcaatagttcctcatttgcaaaacccaaaactaacaaaaataatcaacattccaggtccattatataaacagaaacagagtcaggaaaccatgacagaatcacatcttttagagattcaataaacaacattttacacattttcctgtctatattatcagacaaaacttctaatcaggcaacagattaactttgataagccaggaactactatcctacaaagataagattggttttactcatttatcaatcctacttctaatcaaaatctcaagcaaaatcatgttactaagacgacaaaattgattcagtaaagttcacctggcattgaacatcaatcccactcttcttatactcaacatgtagacactttgtgaactgatccacgtacctaaaacaacaaaacaaacaaaaaaagtcactactttaaaccactcaaaagcatcatctcaaacaaacaaatacaagacaagaagattcacttacgttttagcaccagcataaacagagtaaaaaggataagaaggaataagagcagcagcaccagaacccatattaataatagcacctttcttcctcttaagcatattaggcaacacagcttgagtaactttagtagttccttcaacattgatcttaatcaagttattgatcaactcttcatcaacctcatgaaaatacttagcataaggataagacatgccagcattattaatcaaaatcccaacatctaatccttcaatactctccttaatccgtttcacaccttcatcaatatctccagagaaatccatcacaacggtcaagatctgagtttgactatacttagatctgatggaatcagagacatctttgagcttgtctgggttacgagcaacgagtataaggttaagacctttctgggctaactgaaaggcgaaagctttaccgattccgtctgttggtccggtgatgattgcccatgaaccgtatcggcggaggtttttggatggtcggaggaagtagatgtagaaagatctgaggagggtgaagatgaatttgaagattgagattgaccccagaacgaagagaatgaggagccaagtgggttgtgatttgaagtaagtgcagatctccattagagaagaaaggttgagactttggagatgagatgagtaaagttagagtttttaaggagaaagagagagaaaggaagagagaattgaattttggggcggaagggacgaaggtggatagaagtagatgagcagaaaaccaccggaattaactactctctctgtttcttctgtctctctcctttgtttatttttgattaattttattgtctttgtgttggcttcttccttaaaatttggtttcatgtgatgtttgagtattgaagttggcaccttctgatgttgacagattattttacttgccaaaaatggtaaatttaggctttcatggtgaattgtgcaatacaaaacaaggtttcatatggtaaaagcggaatagaggaggaaaccaagtggtaaacaaaacataggaaacagtgtgacattgttttagacacaattttagatttcttgaggttttgtgacaaatggttgatcgtgaaattatgagtggtgcatttgtatcattttgtttcgagtcttttgacaattggctactccctgacacaagacatgcaagaattgtttttggaaatttgtcgtcttcatcagcataggagatagatagcatattatgttgttaccttcaataattaaattatggttttgtgctatcatcaactaaaacatctacacaatgtcatgtcagaagtgtgtaaagagatacagattaaatttgacactacatcacatacacacattttaatacgtatataatgtattcatctatgtgacgatggtaagtccaaagggtaaacatgagagctcgagctttaagaggactcacctagcagctggagctaggctgtttcttgagatgtcagggctctctagctcgaggaagctagtaagcaaggttttacgagatgattgtgcctttgagctgcttgaactcgatgacttcagtccattttcgtttcctctctcgatcctgatcgcgtcttgtattgccactattacttcctgcatccttggcctgttatgtccacgctgctcaacacattggtttgcgacctctgcaactctccagactgactcgatcttcacgttgcttgctatacatggatctatgatcccgcacacgtctcctttacggatcagcgatcttgcctgttggtgaacaagaaaagcatagagaggatatgtggtttgtgaatcttgatgttgttcatgtagtactttaaacggtcaaaggtgaaaatggacagaagattagaggtgtttacccagtgaactatattcagttcaggaccaaaatcttctgctgagactggcttctttccagagagtaattcaaaaagaacaacgccaaaactgtagacatcgctcttctcagtcagctgctgactagcataatacctgtcaaaagaatgcatctatcagtcaaagttcataaaaagggatacttttgtgaggttgtgttgttagacttactctggatcaaggtatccaacagttccttttgcgacactggatacatgagttaagtcttcctctgtctgtctcgagagtccaaagtcagatactttggctctcatgttaatgtccaggagaatattacttgatttcacatccctatgaataatactaggattgcagccagtatgcaagtattcaagacctgtaataatctgaagttttgtctgtccaatggattcatattatagccacactaaagatttaatcttgagattgtgctacaaacctttggcagcatcttgtgcaatttgtagccgagttagccagtctagtggcttgtagtcgcttgaacctaacaggatggatttcatgagttattcacagaatgaaatccgtaacttaggcaggaaaatataagggaaattggtaaataccatgcaagtgatctcccaagcttccattatgcatatattcgtaaaccaaaatacgccgatctgcttcttcacaatatccaatcaaaggaaccaagttcctgtggtgaattctcgataatagagcaacctgcacatttggtttaattcaatcgtctaattaagaaactttgcagcaagttaatggctgcaaattagacaatacctcagtcacaaattgtctgttcaagtggctagaaggatctgcagttatcttaactgcaacttctttcccatctttcatcctaccatagtagacagacccaaaacttcctcttccaactttcttggaaaaattatcggttgcctcttcgagcacaggaagtgatatgaaatatgctacaccttcatctaataagtgtccgccccgcactgctgagtaagctactaaaccttttttcttagtctctgtggaatcacctgaagaaacatgagttagaacacttggggaaaacctgtaacagctatttgatcaacatacaatgcatatatacctttatcagctcttttggtcttacgaagggcacaaagtaaaacaagacttcctccaactagtagcaacagaattgcgacagcggctattgatatccccagtatctgccaaaagtgctttcgctgtgcctcgttctgaagctcaggattattattatatctggggaaaacatgttatagctgcgcattagcactaaaagaggaaactccataaaagatgaaaattctaaacgctgatacactaaaacgttccaacagtcatgttgaaaagctgtgataaaagggtaatttctctttccaagcaaatgctaaaaagctgtgcactattgtgtttgacaagtcgacttttagcatactcacttgaacaaaactttcccctttaatagcgctgaaggaatttttcctttaaaggagttattttctatagacctgccagataataacattggttaaagtgtcatgtgtagtggataattgcatttgaggtatcagttgtgattacgtacagttcttgtaggttaggcagatgagcaaggtatggtgggagtgaaccactaagttggttgttttctagatgcctgcagagaagatgaggcaaagtaaagccttctggaattcgagtgtcatcaactataagaaaactattggtcaagattagcaagcttacatgattttcaggttgacaagtttgctcatgtctggaagagttccggtcaattcattatcgtcaagccacctatcaaagaacaagtttactcaacaaaagaatgacagagagactaatacaagatgatatctcaaatgcagcattgaaccgctcacaactctgtcaatgcctccatataattgatcccaggcggaatctcacccctcagatttttccttgatagagcactgttgtaagatgcacacaacggtgtcaattatgaataaaaagtttcacaaattttttttacttgtgtaaaactttgtttaatagatcttacattttcgtgactcttggtggtgaagttgagctacagtttacccacgaccaaagaactgggatacaagggtctcctccttcactggcccaatcgctatcaggggacatcgaacgaattgcatcaagaacagacactgcaggattagaaaacttctgtaaactctttatcaacaaattttgatttgcacatttccagcagcatcatagacgggaaaagattcatagaagaatttacaaggtagtagtagcctctagtactcaccgtcactcctatcagttttcacggatattggtagatacttgctaatttcaattgcatttaggagtggcccttgcgtagaatccttagtcttcccaaatgagaacgtcaaaacaaaatccaaagtcacattcatatagctaggttcatagagagtatagctcccattggcattctcggcaatgttcaccactgcattactatagtcaggaaagtatggctgcaccaacttaaatttccgggtctcgttagcaccaagttcttcaatttcagcaaaataagcatacgcacgagcattggcagggaagtcttccaggttcaatctatagctgatcagtccttgtgtgccaactactgctgtttgcatgactttcataggcggatactctctagtcaacgtatttatagtctttgacgtattgattcttgtcgttccaggagccacaccaacaagatagtttggccgtttgttaatatctgactcccagattctgtcatatggatcatctgggtacctaaaagagaaagtctttgagtatttttggatgtctgtcaacattcttgtgaatgatataatggaaagaagagttttaatagggttttacctcaaggcatccatgttcggagcaccaaaattcactctggcagcaaccttcaagaagaaattatcctcgtagtcagtggcatacatcgaaaggttcaacgggcgaagctcaagagtggacatgaaaggagaaccggtgatagcacagcatacacaaacatccacataacttgaagttgcccttacgatcaactcctcaacataaaccctagagacctcctgaatcgtcacagtagcccatttcgttgcatccaagtaaagttgaaactttgggtaggcttcctcactacccaaaccaccataaagaaatgtagttctgacaatgtatcgccttctctctttggtactgagtctgtaacaatacttcttattgtcagttgggaaatctcttctcctacggtattgcatcgagttccaattggtattggccaaagttactggcttgccctgtttgatgatctctgaatctgaaacccatcctagtccagttcttgggtctgtgtagttacttgagcaaccacaatctatacttacaaactctgcaaatatagccactcaatcaaaatttcatccatttcccactaactacaataaaacgcatgacaagagaatcttagtattcccctactcttcaatcccattacaccataaattgaacatttttaaccataaatagtctaaaattgaagacttcaacgcaaataagaacaaaaatttgtgattgaacatcaaaaaacaagttaaagaacacatcaagaacaagaatttccacacacacacacagacacacacaaataaacactcattgaagcatttaaacaaacagattatgtgccataagtacctgtaacttgagacagaacaaaaggtactaggaacaaacatgttacagccaattgagctaagcataaacccattgaagatcacacacacatcgatggctcttaaatctctataattcaatgcaaaaataccaagttcttttcggctttgaaagtggtcacgagataaagaaggaaagcgtgtgatgagagacagtgaagtgaacaaagactccaactttgttaattgcttttactaaaaaaagtcgagttctttgcaatggtcacatagaatttgtctttctttatttgagattcgaattagctttttctttttcttcattcctgaaaatttaaagctatcagtttcaccttttatgctttggctacttgcttttggaaaaagttggtgtcgcacacaatttctcgaaagctttaattcaagctgtactacaacactacagcctacaggtatgtgtgtttgtttttttgtttccctctttaaaacccattgggccgcatttctaaaacggaagtgtaataaggcctaattattagcaggttatagcattaggtctatactacataactaataggcccattttcaataatctactctatcatattttctccatatacagtataagtatgaaaatgaacttaatctttaaattgagaaaatacaaatccattcccaattggggactgttatctgcatgagttacttatttcgaagagttttttcttttctaaaataatgttatatgaaacaatgtacagtatatagttttgattcgaccaaaaaagtgtatgtagttttgtttttgtttttattaatatagggttaaaagatagattatgcaagaaaaatggtttataaattgtttaatattctttttaacacatagtatttcagtttgttttttatgtgatatacaaagacaataagttcagcatatgttattgacaaattgcacaattgcaacattcagcatcttccttaaagttaacaaagagagtaaagtgaaggtttaatccaaaatatgaatattattgttaaatgaaaagctacggaaaaggtaaggatcgaatgagatttatgtgtatagattgtgtgtaagaattaaaatattggtgtcatttgtcaatttatatatggcgcacaaccattatattactaaatactattaaggtgtcggacacaaaattatatatatcaccaatcaaaaaaataatgttttagttttaaaactttgtgatcgacttttagaatatatatattcaaaaaaaaccacaaacattatgttttggaaaagctcctacaagtttaatataaaaagatagttcttcctgccaaattttcgacatctgcattgtgtttgcttctcgtgaatgtggacgatacactgaacaagagataaacatgtaccacgtaaaggacaatcctttgtcgtttaattaatctccgacacttaagtcaagagaaagttatgaaagacacccaacaaatttttatgtgtttaggtgagttttatgagtatggagtattaatattctcctaagattggggatccgattatgatagattttgtataaagtgtataatgttttattcgtagtcatatatttaccggtttcatacacgggatggataagcacactagcgtctataatatcactacaagaacgaacatgttagatgaatcaaataattatgtgttttgtaccatgccgagaggggtgcataacaagtctcattgctcaccagtatcttgatagatgactgatgcgttagccactcctgcttttactaattctagggcctctaagatgaattagtattcaagatcaagtatttagagatctctcgtggacttgacagacgaaatctattccaatattatttaaaacttttagtatttattactaattttgattttaaaaaaacctttgatatgaaatttgagtgataatggtatgtttttattttattttaatggttttggaaattaagagagaattttaagtatttttataaaacaatatcactatattacgcattttcacacttctatattgaatttaccaacatatttacatatgagtttcggagtggaaagtattataattctaaattttttatttaagttctattatcaacctcaaagtaaacaatatcgatcaaagtttcgtatattgcttgctacatatttcttgtaagaaacaagtttcataaagagataaaaagaaagaaaacatgcagtacaccatttatacaaaataagactttttcatatataatttttgcaccatttgagctttctagatattttgtctagtagtattatatatatagtaaaatgagttatacatcaatatcaggtatctataccaatctattaataaagcattaaaaatagaagttgaagacagaataaaatggtgaaaatcaaataacatgaagtatcgtaggaggagattttatatagacattctactttattatattgtatatttaaaggtgtttgtagaaacttaaatattttaagagacataattttatcaaattaagaataagaagaaggcgaaagtgtccgccaaaaagataagaaggacgaagttaatcttgatccttctaatttgttggacaccaatcatacatatacatctttttcttttcgtaaaatatttgttaatttctccttgtgggataaagtactttgttagtgggcattttccatttagttacttttcctaatacttattataatattaataattttgaggatcattttgaaatttctatgcttgtttgaatgtataaagttcattctctcccctacttctcaaaagtttcaccttttagccaatccattttttaagttgaaaacgacttcaaatttttatatagtcttcttggttaaactttgtttgagaaagaatcagagaacactgagagttgtcttcaaaccacttagatcgaaaaacaaaacaaatttgattgcaagaatttagatatacacacctttaaatatatatgctaaatttgtatatgaatttagacctatgataaaaaaaataaaaaatatttatgaaaatatcatatttgttttcaaatgaaatttttaaatgagaagtttgagttaatatattttcgaaaaggtctcatgtgcggcttcaattttttttttttttttttttttttttttttttggtgtgtggtaaccaaatgattatggagacttttagagacaaaagaattataatgtgcctatcattggctccatgaaagtcgttccatatatgaaccaagtcctctccttccaaaataagccttagccatttgcaatctacgattagattacgtaataagtcttttttttttgtcaaaacatacttagtcgttaaagaattaataaaatgaaacagtgaaagatttccatttatttttaacatcgaaaatatgtttaagtaggtacataaggttgaaatgtcgtaaaatatcttattggagtataccggtagggttactagggtagtagggcaaatggttcaatgaatcattggagtgttagatggtagattagttataattgcaaaggcacattacagaatttctgatgcttttattcgttacacatttatttactcagtatataataatttgataagtttcttcccaacttatattgggtttgagacgtatagctttaattagtgctggcattaactatttaatctaattacatagtactttattccattttacaaaatttgttgttttagagttttcacatacatgaaataaaagtaaatgtctaattatatatcttatcgtttcaatttaagatcttagtatagattttttcttctcaaattagtaaacttcatttttttcttgacctctgctacattatcatcatagtattagctagttaacttcatttagattttaaacagataaatttggaattttgttatgtatcatatgtattaaaaataggaaagtagtaattcttgtgatagaaaaatttgtaatccacaaatgcatagacaaaactcattttcatgtattaatatagtaattgtacataaataatatatatatacacatatacaccaataggcattgttggtgtgtacagtgtacataagttcatatgtcacggaggtggatgtcacacccgtttaataggatgcactaacacactcattggtttgcaattattatacttttcttaatattactcaattactatagtatcaaacaatataaaatcgtgaaataaagtactgagaaacttcacttaaagggacgattaatgttattggtagtggttttatacttatactacccaataattagagggataattaaagcactagcattgatatttacatgcacataattaaagattaatgttccaaagcagcgcgtgacgccacgagccaacaaaattgcgacattacacaaatttatggatttacaatttgactacaacaagtgtcaaatgtcggcaggtgattggggaaaatgactcacgagccctattttttattgtgtgggtctaatccaaccttagtgcatcttttgtggcgcatttattataacctctctatgtctattctatataaacatatattccattaacctatggacgaatatatccacaacacgagtagaaacacaaacccaatgttttatcttggtcacgtagagctcctttatcttccctgagcgaatacgtcttctacgttttgtgaaatccgtagattttcttttcgccgaggttaggatatttagtaacattaataattaagccatggcagtatgaaagagtgggattcatatcttagcacacttttgaaagatgtgagccaaattttgatgtagagagacaacaaatgaaattaacgaatttgcatttgaaacatatatagatcgatccattgataagctttaatgatatgtagaacacattctctaattctatgagatttgtaatgaagtgataacccatctttacgcaaaacacattgccgtaacgtcgacaacaaatgaagaatggctttgttaaggtgagttaaaaataatgttggcgcatcatatgtttctttaacattaatagacaaaaataagtaactcaagttacgttttgatgaaaggaaataaagtcgtaagcatgcatctctttgacgatagatgttgtgttgcatgataccaaactcaaacatattgcgaccacaactctgaaaaaaaacattaactcactcaaaattaaagcagaataatttttttgtttcttctcttttttagataaagagagacattttaatttttatgttagtcggaagattccgattcaaggaaatttatatttacttttttcgacctattttgaaaacaatttgtacaatcaaaaagatgttagaaaagtatgcgtaacattttttgttttttttggtaaaaaatcagggccggctcaaactttttgaagaccttgtgctgatttataaaaactggctttagttaatattggtttttaatttctaaaatttttggaccctaaaaccttaaagaaaattgaaattttttttgaggaccctgtgcttttgctcctgtagcactcccctagagccggcactgtaaaaaatatacgtaagattttgtgcaatattcgcagtttttaatcactgaattaccataaatttgttagacatttttacatgtttcttacagtatattagatagactttgattctcattctacatctcaataatatataatatatgatatgaaagttggacagtaatgaaatagtaatcatgaaagtgagactagctatttaaatgcaggtcacatgcaaacctcgtccctgatcccatcaacagaaacatggccagtgtactgtgcaaatccacaaactcccaaacaacgacactgtttctaaatctataatgcgttattcttttttatcatggccaaaaagtttgtgcaattagttagctgtcttgtacgtatataataatagaaattaatgaggaagtatatatgttgtgtgttttgtcaagtctctacgggccacgtccttatccataaaaaagctttgtgcatgacaagctgtgtaccattttcctttattcttttgtctttctacttattttctttcaatagaatataaaggtcaaaacatttgaagtcttttatagtcaaagatcaaacattgaaagtctttcagagtcaaagatcaaacattttaagccttaattaaggttaaacattacatcgacttgttaaggatttgatgatttacgagcattattaaaccgagtcgagaaacctcactagttaaagagtttattttgtgttagacgtgacgtacatgctgcatgcatatatgtaatttaagttgtttgcggcgagaagctgattttttaaaaattttgagacataatgttttaacttttaagctttctcaaacacattatgttcttgatgtatgaacgatagttttttaaatctaatttaacattaggttatcagacacactaatatacatgtaaaactttgcattatataggagccgtgactaccctatggcaaaaaggcaaatgcctaaagccaaaaaaaaagtttaaattaaaggccaaatttttataaaataataagcttatcaattttgttattttgataacaaataattgttaaaatgaaacttttttcgtgaaaattatattcttaactatacctttatctatagaccattttcttatcttgaaaacacatcatttagtaatatattttttttggtaagaatcatttagtaatacatcataattagtaaatataaatatttaaaacaaataacattattagaaaaacatataaaaacaaaaagaataacgtattattgatttttttacattgtaagtttttgatactaatattttttccgattcagtattatgattatttttaaaaactatgatgatagccacattttataaacttgtcctagccctgcacacatctaagcaagacactgcattatatatagagttgcttgtgtgtgttttgtcaatatttttacatgataaaatgatgatgcactctgaatacgatcccataaatatagaagtttaaatctaaatacgatcaccatatttacgtataaaataccaaagagtgtagaagataattattttagttttatagaataactataaaaaggtgatataatccacaatattatcatgtcaatatcttaagaacaatttgaaaagctaaattattggaagaatatgggattatggagcagtgagagacgtcaacttacaaattgagagagaaaagagtttcaacaacttttttttggcagtgaacttagaccgaactaaattccttcttcaaaagtaatccacaaataaattaatattttatagcctcgttttcaaattaaaaacagagagaaatttggaaattccagtacgacgggagataaaacctaacatacgccatggtgaccgttatctaaactacgccaaaatatttgaagtgtcgtcgtttcataataaaacgcaaacaaaaacccactcccactttctcctttccaaaaaaagaactctcgccactttctctgctctttttctttctctctctctttcttgttttcgccggcgatcatggagaaaagcggcttctctcccgtcggtctaagggttcttgtcgtagacgatgatccaacttggctcaagattctcgagaaaatgctcaagaagtgttcttacgaaggtctctttcttcttcttctatcttatgttttccccaacagttggatttactaaaatatctccttactttcctatgttgcagtaacgacctgtggattagctagagaggctttgaggttgctgagggagcgtaaagatggatatgatatcgtgatcagcgatgtgaacatgcctgacatggatggtttcaagcttcttgagcatgttggtcttgaattagacctccctgtaataagtgagaagaaagatcttgacttgttgtgtaataaatgaaaaaggttattgatttttgtgtgttttgcgttgtagtgatgtcggtggacggcgaaacaagccgagtgatgaagggagtgcaacacggagcttgtgattacctcttgaagccgataagaatgaaggagttaaagattatatggcaacatgttctgagaaagaagcttcaagaagtgagagatatcgaaggctgtggatacgaaggaggagcggattggatcactcgatacgatgaagcacattttcttggaggtggtgaagatgtttcttttgggaaaaagagaaaagactttgactttgagaagaagcttcttcaagatgagagtgatccatcatcttcttcttccaagaaagctagagttgtttggtcttttgagcttcatcataagtttgtcaacgccgttaaccaaatcggatgcgatcacagtaagtacgttggcgactttggtttcttatcatgtccccttgcctccctttattatcatgtcttcatagagccgtgaaattttttccggtctcttgtttggcagaagctggtcccaagaagatattggatctcatgaatgttccatggctcactagagaaaatgttgcaagccaccttcaggtaaaaactttaccttgtcatcatcattattcagaacaagtgttagattaagcttttcgtcactttttttttgttctgtttttgtagaaatatagactttacctgagcagattagagaaaggaaaggagctcaagtgttattcaggtggcgtgaagaatgcggattcatctccaaaagatgtcgaagtgaattcaggctaccaaagccctgggaggagcagctatgtattctctggaggaaattctctgatccaaaaagcaacagagattgatccaaagccacttgcttcagcttctttgtctgacctcaacaccgatgtgatcatgcctccgaaaacaaaaaagacgcgtataggatttgatcctcccatttcctcctctgcgtttgactctctgcttccttggaatgatgttccagaggtccttgaatcgaagccggttctgtatgagaatagctttctccagcaacaaccattgccaagtcaaagttcctatgttgcaaattctgcaccatctctcatggaggaggaaatgaagcctccttatgagacaccagcaggaggcagtagtgtgaatgcagatgagtttctcatgccacaagacaagatccctactgtaacccttcaagatttggatccctctgccatgaagctgcaggagttcaacacagaggcgattctgagaagcttgaactgggaacttccagaatcacatcattctgtttctttagacactgacttagacttgacttggcttcaaggcgagcgttttcttgcaaacaccggactccagtttcaagattacagtagtagcccatcactcctatctgagctcccagcccaccttaattggtatggaaatgagcggctgcctgaccctgacgagtattccttcatggtagaccaaggtttattcatatcttaaccttgttccaataacttcttttcgtatattggttggtgtaatgcagaaagattttgtgggtatacctgaaaataatcttgctttcccaagaaccttccatgatcggatgcattgtacaataatccacgagtgtcgtaggctaattacaccaaacaggttgatgacagtgataaggccacatgtttcacaccgtcgcttaagatcttcactgtcacctggaaggaaattagtttgcatgtcatatcatgaaaaaaagatctctactacacattgaatctaattgcaaaacttaggaattttacctccttactccaacacatgtgatgttcttttatctgttgagaatctgtcccataaccttatcatcaaataatgtgagagttcacaatcttagagcagatatacaaatgagtgttacgggaaacgttttacatcgaagatatctaacagttgccacatgtgatgttcttttatctgttgagaatctgtcccataaccttatcatcaaataatgtgagagttcacaatcttagagcagatatacaaatgagtgttacgggaaacgttttacatcgaagatatctaacagttgccacttgccaccagatccaagatgggaaacttcagagttttgaactatctaacatctttctatgcaggcaatggattagttacctgacaaagctctaatttattcataacaaacaatttatgaagctacacacaccatattgcaatgttcggacagtcagatgtcgccaatactgcgcagaactagattttttacctactggagcaatcagggagattctactaaatctctgcaaatggtcttgctctcaccttcacgaagcttttgcatatcttgttcacagttctagttaagggtttcttcgaaagatatagtgggaagttttcctattttcgactactattgtttgaccaatgtctaagaaaagttgaaattgcaagttgtaaccaatggctctttctttcaacaaatctacaatacacaataagttatatgttacaagagatttaacagaagctgtttctgtgagagatgtatagagaaaatgtgcacaaaatagcggtagtctcgtcatatccagtgaccttctgcagcccataccgagacggttgagacatcaaaatcaaccaaccaagtgtcaattgttcagcctcaggccctgtaaaacggttgtatatcattttggtgaaaaacaccaaaattctagtgaaaatgaaaagaagaaacattcagtacctgtttatacttacttggctttctcatccgaggtttcttcagttttttcgtcactccccgggttcagcgatgatagctttccgaatgactcttttgcatccccaaagtagtctttaactttgtcgaacactgttttaagctggtcctgggttgggagctgcgatggttcaggacaaaacacaaacgtttcagacaaaacatctataacagcatccttttggtgtcactgtaggaagtttgagagctgatctcatgtagttaagtatagctcacctcaataacatctgaagtactaagtgcagctctcatgtttccgttttcctgaatgtataatacagccataataagtgaaaacgaaaccagaaaacttttcctacggtctcatcaactacaaaatgaagcagagcttccaataactgaagaaaaagggttttgagagcattactacaagtttgtagccatatcgaaactcggtggctgtacgcaagacacgatgctgcttaattgctgtcttttgaatctctttctcatcctgttgaagataaaaacaattagaaataacatctaaagagacacatattaatagtggaatcaaccacacaagaataagcagaagcttgtgtaatttactctgtaaataacagcggcaatgtttcttgcaatggtgtctttgtagatatacttccccaagaggttatcttttgcagcaaccatgatcttagcagtagtaccaccagctattatactcagaggataccaaagatacacctgttcacgtcacaagaaacactttttacaacaaaaagtaaaatgctgaaaagaacactcgcattgatgaaaccagaacacaattgcaatctgataattgatctaaaaggatcgaatgaaagaaagtacataactttgcaaacaaaaccaatcaagctaacaattttaattcatgttataaacaaacacgtactagaacaaagagctgaaatgttgaaaaatccaaatttgatgaaaccagatgatttgcaatctaataattggtctaggagtatcaaattgaaaaaagtatataactttggaaacagaaccaaagcaaagctaacatgtttaagcgtttaattatctcctaatccaagctaagtgaagaaagagtggaaaagagacgaacattggccatacgaatgaagataacgaatcttgggtttccatcgtcttcaatcttaggcataggaggaggtgtacgttgatactgacgcgccgccatacctttctttcccttagcctccaccacaaaaaccatccgccgctgctgtaccgccgtctctcggcatgccgttcttgagctaaacagagagtgtctcgctaaaccaacctcttcgaatcttcctgtgttcttcagaggaagccgagttaacgcattcaaagacatactcacttccattactcaccagagaagattcactcaccactagtttgtttagaaacgagagattatttggtttggggaagatgatgatttcgtggattcgtaccttatctacttgtacctgccacgtgttcaaaccagtttaaaccgaaccagaaccgtacttcataaggtaatctgaaactcttttcttttacgtatgtctgaaactacttacctttaaggcctgttacaatcctatttccaaagtaaaccaaaaagacaatactattcttgtcttaataagagaagaaaaccataatattagaatctgtcttgtaaattgatcgagacaagtccttatcttcaacaccgtacatgctcaatgatgatcactatgttatataactcttcgtaatttgagattgcgatgcagagaaaggtaagaaactaagaatgaatgattacagtttccacctaaaccgctaggtcctctcaacacattaacaaacatcaataaacgatgtctctaacaaccaaagaaatgtttattttcaccagctaccagattcactggaacctaatgttaggtgcaaaatactacaaactatagtttgtccggctagcgatgaaagcttgtgttgatggttcccttccaagaaaattggtgagaagttccattggttctttgcctcctcctggggccaacacctaataagaaagtagttgttacttgtttagtccttttacactcacacactactaaatcaaaggaaagacaaacaaatacgcttctcactttgtctctgaactgcaagccggcatatagattcggatgcccatctccaaattttgaagcaaatatatcagcagcatacacctgtggaaataggtggattctcagactaaagtcatggaaggtacggatcaccacagtgcaaatcaatcatacctcactccataaacgactgtaacatgttgcttcagagccaattacagcacgtgggaaacatgaagcagggttggttccttccaccactggtagccctatcattacctatatatagaaagacactagtatgagaaaatttctttgccgtaaacagaccagattgctttgagagtttatgcttttacctttggatgaagactcctgattagctggagtaagtcagcatcatcgtccgaatatattatttgatcaaatagacctgatcatccatatttcaagcatcattaggcaataccacattttacccgctagtagacttcttagttaactactgcttcctctaaagcataataagaaccacaatctactcgtcttactaacaaaccatttgtcctaacgattgtgaggaattgatatttcagtttaaaaactacaatgaagtcaaaatgaaaaggtatataagcatcattaaaagtcaattaatatctcacagtataatatctcctgaagcgactttagtgcagagaaagaatatcgccaacgtttgagtgttttgcagacttcatccacaagtggcttggtgatatcctgcaggaataaatcccaggttaaaacaaattattatgactagtctacgacaagaacaattgtcaacaatttagtcgtgagaagcgctcacctgacgataacctgatattaacttcaacgtgaaactttcgtaacacctagagatacaagaattatattccgtctattaggatttagtgttaatacagaaagattttaagaaaaaattatcagtttacttgccagttttccaataactgagaaggaatctcccgaaagtcggggtcaacacgtaggcccgagaatctagcaaatgaagcacgattgcagatatgttggacctatttaccaatagtagcaaggaatatcagctaataacatcccctgatacatacaaaagataccaacagaatttattctgctgttccacgtaaccaatttcattcacgtaccacatggccaaactcatgaaaaagattaaccacgtcagaaaatcccaatggcacagcttcaccactaccatcctttgcaaactgtgcaataagcaacgccacaggaatctggagacagaaacaaaataaatgccaaaatacgaatactaaaaccttaaaatacatccacatgagatcacaatatcgatttatatttgagttgcatgatacttccacataaaggtccgacatggatgtaggattgtcacctgacatgcaccattggagaacagtgcgttattctgaagagccaccacacagctgtgattacattttccttccctgtcaaacaaaattattatcacaactcaaaatgaaatggaggctctaaaagtaaagaggagaatgaagtaaggttgctaatggaccttgtaaacatgtcaagatagaaatatcccaaaagctttccagatcctgagtcaaagacggcaaaagctcgaatatcatgataccagacatcaacttctgtaacctcctcaaattttattcctgcatggcgaaatcattaagttggccagcaagctatgacgaggatcaaataaatggatagtaaatattctcaagccacagaagcaaagcaaaaatttattaatacccccaaaagattttagagtacagacgtaaactcaccaaaaaggtcctgacatattttaaagatcccggaaaggaccaagttgacaggaaaatattgccggatatctccaaaatcaagatcaaactgcaactcctctaccctctttatgtagtataaaagatcttctacgccaaatggaatctccccttcttctttcctctgatattaaaactcagcaagttaagtagtgagaaaggcataacctgtaattatataataccaacattcgattaccttcaagtcttccaaaatggaaaactctctaatagccaagtcagttaaactggaagaaatgtcctccaggaacctgatcacctggcataagaagggcgtcagtacaaaggagtcatgaagaatgttagattaatcacttaaaggttctttcacaaaccctcattgatgtctttgacatcctacgatcaagagcataatctgcgaagtgtgcataaccacatacgcatgctaatctatggcgtgactgaacctacagagacgagaatagtagaaagtcaactgattaaagtgtgctacaggcttctgtcaagggtttttagaatagacacgcaagtaccaatctttgtaacacaggaatattggtatctccacatctctttccatatgccatagccaccgtcttccttgtcttggctatctgcaaagtttaaaacaagagccaaaacttgtttaaatatgaattttaatgcattggcccagaacatagagagagatgttgaaattattcctggttactaaaaaagtcagtatcaagaactggcaagtaactgccaccttttctgtggcaaggcaatcaaaaaggaccatgggaattcttaccttgcacaactctagaatagctgcgacgtgacgactttccaaggtgagcttaaattctttattttgagttttttctaaattctgcagaagaaagtgcagaaatgaaaaatagctcagaaaaagtcatgtccaaaacagataatatcacagatttgcatatgtgacagagttagcaaataaaatttagaataaacacctgaagaaattctagaggcaaaccagcaagctcatcctcagtaaaaaagagacaagaactatcttcatttaaattctgaatgtatcgcaagctaagctcatcaatttcatattttagtctctcaacttcctctctttttattgcagtaaggttcagaccattgtcctcaaagtctctaacctgtcactgataaaacagaaatcaataattcggttcaattcacactgctaagtaaagtgaacagaagtctgcaaacaactctttcaaatgagctacgaaaaagaagctcattatttcaactgctttcttctagagtaactgaatgaagctaataaagcaaaattctctggtccaactcttataagagtgctaattgatagtccatgaggataacaatacctttaaagacttgttatatacgtagaaaaaaactaatgatctcattcgcaagtggacatgttattaaagaatttgaggctggtaaatcactttccatagcaaaagtaaagaaaatcaatagtacaaagtcatggacctaacaaaatctagaattgtggtggagaaattagaaatgataacaaatatgctaaggaagatagatgaactaaataatctcagttgttagaatgtgtttatggttaaggcactagattgcattagcagaaagaatgtgataagtaatgtctgagacagtgaaaaaccttaagagcataagagaagcacatgattcaattttccttaccagacactgtaggtaacatttagcttccggagaaatcgattctccctttgcagcataaattttgataatccggtaaacatcttcacgttttctgataagcttgcacaaagacatgatcttcaatttcatataaagtgagtcataaattcaaaaacagcatttcatgctcatcagaatccaattcacctgcaggaaagtatatgagcgtcgattttctgctccgcttctgtactagctttacgaacattatcgtgaggcgataacatcttaggaaacacacaacattgtataagcgagagttgtctagcttccaattcagccaacggcaatacaacattctcataagagagctacaaaagcaataacaacaatagaatcaagtcagagataattttcctttaccatatctggtttttctcaacttagttttcaaataccttatctagagaaaccaaagcaacagcatcatgaactcgtgtagacttgtgaataatttcttcagctaaatcgagaatctccttcgcagataggttcacacaaacagtatcacaaccaggaagacctaaatttccaatgaatacgaacattgtgaaatttgaattcgtaaattgcggaatcaagcaagaggaagtgaaaggaagacgagagcgagagagagagagagagtgcctttcttcttggatttttgcttgtgagacttgaaagtgaagattgcgaaactgacggcgagtccgagtaaacccgccgctccggtgaaggttacaacgttgagcttcttcttaggattagatccttcgattttcttgtcgtttccttcgttttccgtcatttttcttctgctattttctcgagaaaggaaaaaaagagtgactgggagggaaaagccctctcgctcgctgatggacccaaaggcagaaagtgagaccgagacacgcacggaaaaaaatctatttctttggtaaaagctttattcgaattgtaattaattcgtctttcttaataagctagctattagcctatgttatacgttaaattttggagacaaaaattgcaaattttgaactcgaagtggtttgactttgatttaaatcactatcatataaatcgatctaaagcttgatgtgttcgtgagctatgagctagcaatgtactagaaggtcaagtatgtgacttagctcgtgttgctcctgattgattccgcttcactttatcgtcaatctaaagtttagatggatgagccgtaatggttttcaaatctctctcttttctactttcaagtaaaagatcttaagataattggatcatgagcataaatgagatgtgaaaggcccatataaaaagcccattaatttgtcttaggaaatgtcatcatcaaatccgttgaagacacttcaattgcaaacccttgacaaaactctcgaagcttggatcccgatttctccaagcagccatggctccgaaatcgaaagaaaaatccaaaacatcgaattcacaaccacctccagcaatcgaagatctcttcacttccctccaccaacatatcaaggatactaaatatgaagaagccgtcaaggtcgctgatcaaggtttccacaattctcaccttccttctttcctcgttgattttccatttggtgaaaatttgaatccgtgatattgtttacagttttgtcgattgtacctaccgatgaggatgcgatccgatgcaaagttgtggctctgataaaagacgataagttcgatgattatctaatcaaagacgttaagatcaatggtgctctctccgtcattaactcgttccagaagcttccaatcgatctaggttttcacaaggtattgtaattttgcatcattttaactacatttgatctgaatttactgagatttgtaatggatgtttcgcttgataggcgtattgcttataccgtgtaaacaagctagatgaggctttggtgtgtttaaaaggtctcgagagagatacagatactttggttttggaggctcagattttgtaccgtttggggaaggcagatgcgtgtgtggatgtgtatcagaaactgaccaagtcccagattgagacgttagaggttaatttagtcgccgggttgatttcagctggaaaagcttctcaagtgcagaaaacattggagagtttgaagatcaaaccaactagtagttttgagttggcttataatactgcttgctctttgattgaaaacaataactatgctgatgctgaacaacttttgctcactgccaggaggtatatattctctcatctgtttctgagaaatttgagcctagtattttgggatatatagatgatttcctttctctgtatccttatcaacatttcaagtacattgaccatttgactattgatttcccaagtcttgtacaatgtacgcatacctgataaatgtactgttactttgagacagaattggtcaggaaaccctcaatgatgacgacatcgctttaaccgatgaagaaattgagattgagctggccccaattgctgttcaattagcatatgtccaacaggtacttttatatgctgtttgtcctctcctaaacatcttgtcaagatatattccagtgcctagtaacatagtttttttcctttatcagatccttggacaaactcaagaatccaccagctcttatgtagatttcattaaacgaaatctggctgatgaaccttcacttgctgttgctgtaaacaaccttgttgccttgaaaggtttcaaagatatttctgatggcttgaggaagtttgatctgctgaaagacaaagactcccaaacttttcagctttctcaagcacttgatgcaaagctttcacagaaacataaggaggctatatatgccaatcgcgtccttctactcctccatgcaaataagatggatcaggtcctttaaacttcaaatctagcttattcctctttcgtttcttctttacatatgcttaaccagttaagaaaatgtttttacctcaggcacgagaactttgtgctgcactgcccggtatgtttcctgagagtattattcctacattgcttcaagctgccgttttggtgagagaaaacaaggctgccaaagctgaagaacttttgggacagtgtgccgaaaaattcccggaaaagtctaagttggttctcttggccagggcacaaattgctgcttctgccagtcatcctcatgtagcagcagagtccctatccaaaatacctgatattcagcatttgcctgcaactgttgccaccattgtcgccctcaaagagcgtgctggagacaatgatggtgctgctgctgttcttgactcagcaattaaatggtggtcaaattcgatgaccgagagcagtaagcttagggtattgatgccagaggctgctgccttcaagctaaggcatggtcaagaagaggaggcttcacggctatacgaggaaattgtgaaaaaccacaatagcacagatgctctggttggtcttgtgactacacttgctcgtgtcaatgttgagaaagcagaaagttatgagaaacagcttaagcccctaccaggtttgaaggctgttgatgtggataaactagaaaagacctatggtgcaaaacccattgaaggcgctgctgcttcatcgagtcaggaagaagtgaagaaagaaaaggcgaagaggaagaggaagagaaagccaaagtatcccaaaggatttgatccggcaaacccaggtccacccccagaccctgaaaggtggcttcccagaagggaaaggtcaagttacaaacccaagaggaaggacaagcgagcagctcaaatccgtggctcgcagggtgcggtgaccaaggataaacaagaagcagctccttcaacttcaaagtcaaaccaagtggccagttctaaagggaatgcacctgcgccttcctctaaggcctcaaaaaagaagtctagaagatgaacgaaacaaccctttaagattgtttcatctgttctgagaaaacaaaaacaaagagtacttagccccaaaatttccattgttctttttctttttggattcatcaagttttagttgtcttgacccatttaagattttggttaatttctcgtttgcattgcctgaattcttttgctttgatgaatcggttaatagtaaaacactaaaactaaagaaatggagacaagaaactgagaaagaatggattaattacaaagaataacaagaatcaaatgtaataaaaaatctctttactaatcacttttcagatttcttgcggagctccttcatccatttgaacccaagtaatgtcttcccaagactgcttttgcttccatcttcttccttcttcttcttgttcttctttttgctctcatcctctttcgtcgaactcggtagagggtcagggttattgtaatcccattgatcagcccacgacggccctgaatccatcttctcttcttgcagatgtttaaaactaaacaacaactaacttagaggaacatcttcaattatctatttgtagttttcctcttcttgttcattgtcctttgtttgagtttattagttatcagtttttctcatgttttttggtaaccaactcctctatttctgcattcctctctgtttttggtcatctgcttagttggcacaaagaatcaacctattgtctttcaactgtcttcacctatttttgcaatgaaaatcatttcacatccaattaatttacagacgatagaaaaccactaaactccaaagagtgaaatctgattaaagagtgttacatcatttaaccagtttcataagtacaacaatgcgtgatctaataagatgaatcatcattctcctatttcatctaaaagaactcgacatgatcagcaatttctctgcatactagttttgattccgcagccaaatttaggcttttagctatggcaagcttggttcgtttatgcgtagatgttggctcatactttttcacctcctcatcctctttccctaacaacaaagcctcccttgcaggaatcacactctcccaccagaactcccttaatacatcatgtatgattctccaatagcttcggtctctcatcacacggaaaaccgtgcttccatttcgtgtccagcagtataagttgacccattcccggtccattatctccatttgaccctgcagctgaggcatgtaatagtagggcacttttttccagggtaatacagtttcggttttccctttgttatatggacatttcacttctagaataccaaagcaatcgaggattccatccggtgaagcgccaagccagtgaaattcctcattggagtgaatagcaaatcccattgttccaacctcacaacccattattcttttgtacctttctatcgcagatgattccatttgtacaccccagttcatagcaaaccgtgcagactcctcaacaactcgtgcatctgaatcataaaccttttcatgccagagctcggcacgccggtttcctttccaaaaccccagcgctgtactgaatgtacttgtggttaacttgtctttccttaaagcaaaccattcttcagatttctgagggatatcagatggggagagaaggcttgacacaattactgatgaacggggatgagcaaatggtgaaatggtttgagtgatgagtgataaagcagtagaagaaaacctctttctcgaagaaactgaaccgcttgacttcggaagatgagtatggaacccagagattgagcaagtcctcatagctgaaagaatcatactgttgagagcaactttattcggcttcaagactctacatacacagactgttacaaaggttagaggaatcatattggaaacaaacataaactcaagtttaataaacccattccactacttcaaatctacaatcagagctactctaataaacactagaaccccagaactaccctggaatctttttcaaaacataagatgaaaaaaacaatctttgaacttcaaaaacatcaacaggattcagaaacaagacaacacaaaaaaaaaaaaaaaaaatccgatgaaatcaactaaacccatatacaggacaagaagcgaacttattatccatgttatgtgatttgcgtttcaattttgtctatacaaccaatgagttcaaaagcactggttcctccttaagaatcaatttacccacaaagcgaaaattaaaaaatctcaagcacacaaggtgttcgatgatattaccagaaccacgcttcaagtagagaactccaccattccgggccgaggaagcggaaatagaagaaatggattcagtggaagatacttgaactagcctcatcatcatcaaccaaaaatcacattcgaaaagaccagacaagtttctgtttctacaagatatttgttcttctttctaggccggttttaaaagatgaatccattcgttgtcgttttagtttttccatcaatgtggtcataaagttttaaggcccatgaagcccaatcacaatctcttatgggactttaatttcatttttattttcttaatatttgagtttaatttcattacaaaagactcatagtaatattttccaaatgagctctccggttcaaagatatacactccaattcaaagattgttacaacggtaaggaaagaaatatacaccggtgaaaagtgttatcacgaacgtggctagcaagtgtaagatcgcgatggtggaacaaacaaaacaatgaaacattcttacatttttaaggattttaacatattcttagatgaattaaaatgtcttactttgaaactcaaaaacattgagatataggttccggatggagaagtatggtacataataattatcaagaatatatagtacagttctaataacaacgagaatataatacatagttaacatttaaaatgatcaataatataaaaagatataaaacaaattaagatattaggagaaaaagaaatgagctgtaacaataaagggtctctatatcacttttatccacctttcctaactcctcttgaaaacaatgatattgatcacaaaacttaacaaagttttgaaaggaaaaataaacgtatatatcgttgttaatattttatttattatacttagctttttgttatgtattcaaaacttattttcattttactataagtaataataaatatagctaaatttgaaaggaaaatttctaaaatatttttaataaatattttgtagatgtgagagaactccatatatattaaattttaataaataaaagttttaaatttagatgcattgagtcttaatgggtttcaaatagttttttaatctctttttatactttcaagtaaaaagattattgaatcatgagcagaaaaggcccatataaaaagcccataagttattttaggaacatcttcacagaccttgattgaagtcaggtagtatataaacatcaatctgttgatttttaaagagtcaaaaatctgccagttttcttctctgttgtttcgtgccctgagaaaccttgaagcagccatggctcccaaatcgaaagaaaaccccaaaacctcgactccagcaatcgaagatctcttcacttccctccacaaacatatcaaggatactaaatatgaagaagccgtcaaggtcgctgatcaaggtttccacaattctcaccttccttcttactcgttgattttggtttggtgaaaatttgaatccgtgatttcgtttacagttttgtcgattgtacctaccgatgaggatgcgatccgatgcaaagttgtggctctgataaaagacgataagttcgatgattatctaatcaaagacgttaagatcaatggtgctctctccgtcattaactcgtttccaatcgatctaggttttcacaaggtatagtaattttgctaagatttgaaagttttttggggtctaatggatgtttctcttgataggcgtattgtttataccgtgaaaacaagttagatgaggctttggtgtgtttaaaaggtctcgagagagagtcaaagactttgcttttagaggctcagattttgaactgtttggggaaagtagatgcttgtgtggatgtgtatcagaaactgaacaagtccgggattaaattgatagaggtcaatttagtcgcggcgttgattagagccggaaaagcttctcaagtattggagagtttgaagatcagacctacgactacttatcaattggcttataatactgcttgctctttgatcgaaaacagtaactatgttgatgctgaacaacttttgctcactgccatgaggtatataatctctctttttctgagaagttttagccattgtatatgtctcctaggccattgttcctactagtatttctcaagagatacctttcgatactcgtctagctttgatgcaattattcgtctagcttaggatcagtgattcggtaaaatagttgtttacactgacacttatataaccacatcaatctagattatttcctttttctgtatctttatcaacacttcaagtacattgatcatttgactactgattactcatagctgataaaaaatgtactgttactttgagacagaattggtcaggaaaccctcactgagggcgactattctgatgattatatcgagactcagctagccccaatttctgttcaattagcatatgtccaacaggtacttttttatactgcttatcttttcttttacatcttgttaagatatcttccagttcctaataacagtttttttctttgtcaaggtccttggacaaactcaagaatcaaagagctcttatgtagatatcattaaacgaaatctggctgatgaatcacttgctcttgctgtgaacaaccttgttgccttgaaaggttccaaagatatttctgatggcttgaggaagtttgatctgctgaaagacaaagactcacaaaattttcagctttctcaagaacttgatgctaagctttcacataaacataaggaagctatatatgccaatcgcgtccttctacttctccatgcaaataagatggatcaggtcctttaaacttgaaatctagcttattcctctttcgtttcttctttgcatactctgcttaaagttaaaaaaatctttttacctcaggcacgagagctttgtgctacactgcccggtatgtttcctgagagtgttattcctacattgcttcaagctgctgttttggtgagagaaaacaaggctgctaaagctgaagaacttctgggacagtgtgccgaaaacttcccggaaaagtctaagttggttctcttggccagggcacaaattgccgcttctgccagtcatcctcatgtagcagcagagtccctgtccaaaatacctgatattcagcacttgcctgcaactgttgccaccattgtcgccctcagagagcgagctggagacaatgatggtgctactgctgttcttgactcagcaattagatggtggtcggattctatgaccgatagcaatatgcttaggatattgatgccggtggctgctgccttcaagctcaggcatggtcaagaagaggaggcttcacggctatacgaggagattgtgaaaaaccataatagcacagatgctttggttggtcttgtgactactcttgctcgtgtcaatgttgagaaagcagaagcttacgagaaacagcttaagcccctaccaggtttgaaggctgttgatgtggataacctagaaaagacctctggtgcaaaacccattgaaggcatttctgctgcttcattgagtcaggaagaagtgaagaaagagaaggtgaagaggaagagaaagccaaagtatcccaaaggattcgatctggaaaactcaggtccaactccggaccctgagaggtggcttcccagaagggaaaggtcaagttacagacccaagagaaaggacaagcgagcagctcaaatccgtggctcgcaaggtgccttgacgaaggttaaacaagaagaagctccttcaacctctaagtcaaaacaagcggccatttctaaagccaatgcagctggcccttcttcctctaaggcctcgaaaaagaagtctagaagatgaacgaaacaaccctttaagatcgtttcatctgactagctaatataatgagtggaatagtgggacaaacaaaaacaatgaaacacttgataacatattaacaaaaatttagatgatttaagttgtttcacttcagaactcaaaagcatttgtatctagtttttatacacactgctatcaaaaaggtctatgatactattgccaaataaaccattttcaaagatgtctttagtgatgaattttacataaaccaagaataccagaatgtgctccgcatacctctccttctgcgtggttctcaaggatattctcctttgccatacaaacaagtgtcactttcacatattaatcaaatcaacctttcatacaataggacatgcacaaattggatatattcgatataaaagagaaaaaaaacatttatacatatgtaaacaggtcatgaacagagattatccattagtcatcaatcaagagaagtcataaatagtgaacatgtcgttagaactttgattttccgattgcttgcaagaactataatctgtgttctaaacgccaagagagtagcaaaaaacaacctaatactctaaaatagctttctcttaatgttttcagaccgaacaatctaaagtcgcactatcaagaccatgactcaggacctcagccacaataacaaaccagacggtcagagtttcgtttgcacaaaattttggagaacctacaatggtcggtaacagaaaacagagtgcgaatttgcaattgctacattgtaaatctgttagttctctatttattttttatttcttttttaagtttgtaattgaactttcgttcctttgatggagtttttttttatatataataaaatacttaagctataaactttgtaacttggcaagtaagttttgatgtgtataagaaactaaagtgaaaatgataaaacctttaaaaaagtaaaaacgtgttctatagttggaattgactgttgtggtcttgtggattgacgactagatgtgtacgaggaaagaaaacctttcaagtcacgctttgcaccaaaatccctatgctcactgtgattgaatcttgagtggaaatcatcaagtgaagagttttcttcctacttttttattttgtgtgattatcttctttcaacaatgtatttattgatgtgagacaatgactagtgttgaaatgtttttataataacgaggtcaatgagattgaacgtgtcttgtggctccgatatatacacttggtgtatagttgtttctttgtctttgttagtcactattattcaactattacatacgtgtactatctaaacgttggcggggttttattagtttgctgatgattagcattaatatattatgtgtaacatgcaacttatacgttacatatatattagtttaactagattttaactcacggtacaccgtggagacaatttatttttttaaattaatatatataaaattttgcaaattatatctatctataaaatatttttattttatagtttacaattgttattaagtaacgtccttccaaacccgttccgccaaacctgtactgtaaaaaaaaaccgcggtaccctgctaatttaaatttataattaaaataaatattttacgggattgcaatcgtgttttagtttgtcaaacaaaattttgttttaaatagttctcgaaatctagttcaaattttgcagaaataagatttagtgaattgataagaaatgtatttagttgcgttttgctcattttaagggattgcaattgtcttttgggttgtcaaacattttttgttttaaatatttaccgaaatctagttcaaattttggaaaaatctgcgtgatatatgggattgtaatatatttggaatgtttttcgtttgttaatcaatttattgctgaaaaaactaataattaaaagccagtggcagccattgtaaataagttccaactctaggatttattttacaaaatgactgcaaaaatgtatatatagatgatataacgttcaagttgccctagaacaaaaccttggtctttgaaaagtgaaaacgtgtttctatattttgaattgattttgtggatcgccgagtagatgtctacgatgaaaacaaaccttccaagttatgcttggcaccaaatctctatgttaattagtcattaaactaaattagtaagttttgacgtgtgagacctttgtttttcctttatattgtccacataaatgctaacaagtgaaaagttagttatgatatatgagatatctttggactaaacaaattttaaacgatttcttagtttatcaatatgttaaaacataatattgttgaaaatgaaaaatgagatagtagtgaatatgttttaaaatacaagaaagtaagataaatttgtaagaaaatatgctgatgtaaaaaaaattgtgccctaggttaaaataggttctagatctgcccctggttaggtagttatatagacaataatggtgtataaataaatcatgtcatgtcttttaggtgttcttgaatctatgtgtatgtcatttcctcataagcacccttagattccagatatatcttttggcctgattagtaataactcatttgtggagaaataaaaaaagtattagcaagtccatcttttgtccattttatttttgaagaaagatattttgagcattgcaaagaagttccacttttgtcttgccacaacaaaattcttctcattctttgtttcaaaagccatattcatatgagacatttgaaccgattctaaataaggctgtattatcgagttttatgaaaacatgaaaaaaaaaaaagaggactgagaaactttaggaccggtgtcattatgtgacagacaagagagaaaactcgtttaataaaaaaaaagtctcgacaaatcctatttataaaccttcaaaccccaaattaagtcatgtatattaacacaatcattctatttatattaaaagaccgcgggtatcatcttttcctgtaaaatgatttcgactttagttcccacaccgcaaaacaatatggttcatagttccaactacgcaatcttcttaccttccaagattcaattttctgaaaacaagatcattgctctaatcaaaccctgaaatagagtttaaactataaagcaattaatgtttctaaactagtagtagtgaactaatgagctatgaaatttgtggatatggttgtaatcaatcccctgaaatagagagtagaaagcatcaaagtgttctaaactagtagtgaactatgcatttctttttagcaaaagacaggggttcatagttccaactacaaaatcttatcttccaagtaaacaagatcatggctctaatcaaagccctgaaattaagtagtagtgagctaatgcaattacttcctggcaaaaccagatttgagtcaaatgatcttctcattctctctcaatgagaagcaaactagttatcttgtcattctctctgaataaacgttttgtttatctgaagttgatgtaaatgactttggaagcttggttttaaaagaaacaaaaatgaaaataaataacatcagagctctccaccactccctacgtttcgatgtaaacaataatatgttatacttaataatacagagaaacctaacactgagaaattagtcaacatgataatatttttattcagaagcataaatgaaaccgaaaaagcaagaatttaattggcatggagaaaccatcgagcatccataagagacatgtcgtcaagagcaggaaagcgtttgagggtctttgttacaagattgaacacacagatgtcaaggtcacgaggtctgcattggcagggacggtagtgacgggtgaaatagatggagtctggttcgataccaagggtttcgttagcaggtatagtgaaacccaagtcaagaagcagggcctcaccaccaagagaatcaacctcaagaacagtgtggcaggcgtaatctgggagttctacattaggatcatacttgtagacgcggaagcagtccctctgccatggattactctcaaccaacaaaacctctccagaggttgtaacagcaatgctagaatcccacgagtgataacgagaaagcattgagaatggtttattaccctcggtgatgtccttgaagaaaccttgcggtccagacagatctaggactttaacaaaacgacgacttgtcgagatataaagagagtaacgccccagtaccatataagataagccatccaaaaagtgggcgtctcggaaaaacagaggaatgtcagtgtaatgagtgtcccctttcttgcaaaagcttatataagagtggccagggaggtcgaagaaccacaccacaacgtaatctgttccactctcgtctacccacaaaaggcccctcacagtatcacaagtcagatcagtggcaacacgggcactatattccgggccattatattccctttcaaatactctatctcccacacgcctgaccttactagtatctgacgcaatcgactctagagacggaagaggggatcgttttctcgctaaagacatctatgataactaaattggatccagaatctaacaacaataaccagtaacccgagtttgccaggattcgagaccctggaaagtctcgcagttccctatggatcttctttccttcttttgggttgtacagcacacaaccaccgtctttcggtaaaagcatcagccatggagatccgcctttctggggtaacgtttccgacgagctacagggtcgtttgactgaagaagaagatacattcattatcaggcgcaagggttctcgcgtttgtggcctgagattgagggaggcgtgtcaccttctgtctgtagaagatactaaaactgggaagaaagattgtttcttttgatattgatccgttctcttcttaacgattacatgaggcatagctccttatttatactaaagttaagcccttgtaaaaccctagttaacattacacatgtcatcatctagttaccataaatctattctttgttcattgtacctcttttgcttgtgacaatcttcctcttttgcttgtgtaataggctaagggtattaaatttaatgtttatttttgtataagagaataattaaagcgttttttaatcaaaaaaattaaacacctaaagccgcatcaccagcgttgaccaacgttccggtcaatcgaattcggtattagggtttaaacccaaccgtcccccatttctccaccgcgcttagctaatgttgacgactcttcgatctcgttgttcgtctcttcttctaaatcaatcatggaagctagctcccaatcgcatcttcgcttcctctccctctttttcttcatccgccgggatctctaatgtctcagagattctcacacttcccgaagtggagaagattctcgccgacgtgaaagctgataacgtgactgtgattcctacacataatcattgtttctgggctgatttcactgtcatcgccaccggtagatccgattggcacttaagaaacatcgctcaagctttagtttatagggtacatacacatttcaccttccactttttcaattccttcgttgctattgttcaattgttgatataaggatggataatgagtacgtgttttgtgttaagagtgaatttgaagactaagatgataagagtgatcattgttttcttatattctttgtgttcaatcacaggccaagcaaaagcagaaaggagctaaacatgtaatgttaccttctgtgcaagggtacaatagcaagtggattgtcatagactacggttcgtttttgtatctacaagtcttggtttttcatttttgatttgtggtggctgtaattagctcttatggatacgtgtaggaaagtttgtagtccatgcacttgatgagaaagccagaggttatttcaatttggaaagcctttggtctgctgaatcctctggtactgatacttcagatcaggtaaacaattgaacgccttacatatagattttgtatggctgataagtggttactgctaatttcgtgaataaaagctgaaacttttagcttggggttatgtctataatggagataagagatttgattatgtcatgagcattcgacaaggactgtctctcgagtatttgattgaacctagccagttattaaatgtcatatctgatgcttctcttgctactacagaatctcttttagtattgatttacatttatctcctgatctcttgaagctctttacattcttctgtttcttttgtctacctttctcatcgattcattgagaaaacaattcagtagcctaggttaatgtctttattgattccaaagacacctttttgttcttgcaggatctccaaaacgtttttgtaaaggtccgaccaaagaacaattcgaaaaggaaaccggctaaagtgagttcttgatcctgtccgatggatacaatttctcataaacttctcgagtctagacgagttaagaataggaggattttaaagcctattaagtatttatctccttaatatttttttttttggtaagttttatctccttaatatttgtagtcatctatctattttttccttaatatctttgcttaaaaaaaataaaaaatttagtcatctatctattttttttttcttttttaaatatggaaaaggattaatctgtctctcctcctcaaaaaaaggaaacgaatttatccctcttaatataaataatcaaattggcaaacttgggaacagacactcttgaatctctctcaacatggtggtatccttgtctttgcatgcgtcttcttctattaggaaatcgaaaacaaaagcaagcttatgtctcgattctttaccagaagatcttctcgtggagatttcttcatgtaccggagcttcttccttgtcagcggttcgtaatctcagactagtttcgaaatcgtttcgacgtatctgtgatgaaaagtatgttttctaccgactatccctcaaagaaatcgaatttctcccatggcatgagaacagtgcaaaattcatcgagagatgtaccgagagtagaaaccccgaagcgttgtttcagaaaggattcattaactattttcgagataaacttcaagaccgaggactcgaatatttagctgaagctgcggaaaaaggtatcaaagaagcaaaatatgtctacggggtgattctaatctgtcttggaggcaaaacaaaacaaaagggtttcgagatcttgtcttctgttataaagcagttgatgtcaactacaatgaatgagttggtggaatttcgatacaagattcaaaagattagatacggtttttggtggtctgacaacacggtggtggaacaactcaaaacagcctacgttagtgagaagtgcaagtgcgattgtaaaaccaggatgttattattagtaatgaatcgtggttggtatttattcggtgatgaaaccgacttggatttttcttctgcttgtgagttatatctggtgcatcatgaagttgaacttttcttgagatgatttagtgatcaatgatgtattaaactaaattataactaataaagagtgatttttggttttactttcggatacatttatacgaggaagagtacaatggccaatactctactgcttcttattgcatgaacctaatactaaatataaatcgtaatacatagcttcttttggttataatctcaaccactactctagattgtattctgaaatagtacataaaccgaaattttccttttgaggccaaaaaatctaaaattgatggggagatatactgggcctgtgaatttgaaccgaaccgatttgtccgaaccgaaccgaaccgaggtttggacaaatcggttcggttaaggttaattgagtataaccgatcggtaagtgtttaaaatcatttcggttaaccgagattttcggttcggttcatgagaaccgaacggttaaccgaaaataataaaaccctaacctaacctagattactagccgcctactcttcttctttgtcttttttttttttgattcaccgggagacggaagctcccggaatattattaaaaaagaaaaaagaaaaaaaaacaaagcttacaaccggactcgtcttggtcgcgttgacccaagactatcctcatgcaaaatcacctctaaatcatccggaacatcaataagagaatgaaaacctaaaggtaaagaaaatgcatagttagctagaccgtcggctagacgattagcctccctatacacgtgagttattcggacaatccagtccttcgataataagccatggcacaaccgcaccaggaacgacagcggatgttgatcaccgatccctgtcttgagaaaaccaactaccaactccgaatcaacttcgagctccacacgagtcaacgccttagtccaagctaggtaaaatccataataaaccccccacagctccgctaaaggcgctgagcatctcccgatattaagcgcaaagcctccacaccaatttccagctccatcccgtatcacaccacccgccgtcgctaaccccgggtttccacgagaagcactcttcttctttgtctgataatgcccgttccttattctttttcttctattcttcttcttcaattcttcttcttcttcttctaaatgactaatatcattcttcttcttcgattcttcttcttcttcaatccttcttcttcttcgatcattcttcttcttcgatccttcttcttcttcttcttttctgagttggattcgtcatctgaatgctttcaaattgatggttggatttgatttgctttagtttcttcttgctttttctttgtggttttggattccgttgatgatgcccttcttcttcactgttgatttggatttcaatctagaaatgaaggcttttcaccatttttcacaagtttttttcctttttttttttaacacccagacaaaccgaaaaaccgaatgccaaaaaccgaataaaccgtgtccgaaccgaaccgaaccgaatcattagtcggttctattcggaatagatttcaatttccgaataacccgagaaaccgaaaaaccgaaaccgaataacccgatcggacaaaagtcgcaggcctaagatatactatacatctgaatattacatttgcatctaaccgtagcatgaaaagtgagaggaaccaaaggcttctattatatatggaattagcagagttgggcaaacgttgcaggttctgtttttaaatagagatgatggaagcgtgcatcgattctggaccgcctttgtaggtaagctcaacgaaagtacctgcaccttctcctttcgcaagtcttcccgggtttacacaaacgcacttggctgcatcctcctcttcgccaagggataaaatcttcataacaattcaagaaaaaattcagtaattcttcttttagagtctaacttctgaatttgatggcactattaacatactgactcaccttcacgaagtacctcatgtctgatggaagtagaagaatatccgggattgatgaaatctgtagcgccttaggagcgagtgaggaatcataagggaggctctcgggcggtggatacagcggatagaagctgtttcataagaatccaatttctgagtatttggtagctgagaatctagttggatctagtagacgcaaaagttaccttcgctgacggaggagatggctagcgagtctggacatgcgatcagtggggactccacttggattttttgacatctcctccccactcagctgttttagtacatccaccgtgcagcaacttaccttcacctgagaatacccagttaacattttatgttgcaaggacttgagagaatatggcttctcagaagagaactgtcacagtgattttctaacctggtttgcctcaaaggtccccgggtttgacagactagtcatctgtaatgtatgatgagacagagacatgaaaaaagtaaatatatatccacctgtgcacagagagagttgagtgaaggaagggagacttgttaatgagaagaatcaaatacctgatgttcgagatcaggtatgtgaatgtcgaaaggaggctgcaaacacaacaagaaacttttcgaatcaaacagagaagacgaatgcggaaactctagaagagagatattaagaggaaatagaaaagagcacctgtgggaatatgaaatcatggttagcatcacgaatggatggcaccagaaccactcttacttctgaacccatgaattccacgtaatcttgcaactgagaaactcaaaaaccataaacatctttgtttattccaaagtcagtcagtattcagtatatctatttgtcctattttcagtaccttcctgaggacttccacttggaatatctcattaaaggtggcatcaacagcgcctttcttaatctctggatgctcagaatccacaaatggtccaagctgagtttggaaataaaacgtaagtgatcccgagacacaatcacacaagagacaaatatctacagaatgtgtgaatgcattctagttactcaccagcacgagtaactgtggtggctttctttttgcataggctagtagctcattcagtggctcaaacagcaagttgtctgatgtggtgaatggtccggatgcaattatctgtcaacagaaagacctttaaacatcattttgaatcccaaactagaaaattatgatgctaactgattctaaacacaccatccttgtgcttggtaatgacaacttaatagctatgcataaaaacagaacatatccatacattcatctcaaatatcatcataaaagaaaaggggaacacagcatacaaattttgtttggcattatcgaagtcagtaactaaagtagctccactccaagttaccaatctagctaagtaaaacagctttgtaatctctaaattctcaacattctgcagttatctcatctcaacattatgattatgtgtgtataaatgtacgagaaagaagtgtgccagaatcatataaaataatcaatgggttccttgacgatataggtaaaaaaatactagtacagctcccttgacatgaaggagtgcatacttacaaatgaaacctctgatttttgacaggattcttctgcaggaactaagacttcctgatccaagatttgcctcttagcaggaggtagatccacgtcaacagtaagtgttaaaggaactgaatctagcagcttagatgcagtgagataatgtccactaggattttgcccctcaatgccaactacctgcatcaaattcagacaacttccacatgaatattatgagtgttctgtggaaaaaacacaatatctaatgttgttagctttaagctatcacctggccaggaaaaatggagaactgatctagtctctttaagtccactggaacacgctgtcctgaagtacgctcggcactgcaatcatcgaatttgttggcattaggataaggaaactctggatatttggaactgaggcttcatgtttaaaagaaagttatgccaataactaactataaatggctataccctataggaccacaatgtaagtcattctagtatccaaattgttgaatatgcaactttttataacacaggattcataatccttcacgatgatatacaaagaaaagtgaagtcatgatggactaacctgctctgcaatagaatggacttatcattcaaatgcccctctccatcacagcaaatcattcccacagcaaatatacttctctgcagcaatcagtagcacaatgtaataaattctataccccaatgttaatttatttgacaccaaagtagtatgtatgaacaaacctacctgtgaagcaacagccggatccacctgttcctcatataatcccgaggcagcaaatgcatctgcatgccttacgatccgatactcgagtgcactaaacctgtcctcagttctgtcatacatgaacctgcaacctggttcagggcctgagccattgacttttagagaacaccgctggctggtttgaactctcttaatgatatcatcctcactgttttctacatcattgttgtttccattctctgcatgtgccgccacattacccacattgaacttcaccacaaacttctcgattcgtgacccaaaaggtgtcacatgtccaactgacttcccagtagaatagccataatctcttgatctacttatcgaatcaaacggatccggatgtaaccgttgagacttgtttgtaggagtagtaacaatctcttccgtatcttcttgcaccccatccaaaagcctgaaccaaaaaaccaaatctctatatcttcaaaaacaaaatctgtttaaagctaatgcaaagtaagaagaaacatggtcaaaaagcacttacatatctacatctctatttgagtaaagatgcagaccagcttcttccactctcataatagattctttctgttcattctgaagatgcaatacaaacccatccatgtcatctttcttaacagtttgatcaagaagttgtctgttgcatcaaaccaaacacaatggaaaaaacaaacaaactcaattctcttcgccatcactaacacaaccactctaatcatgaaattggtcactatttaaacatcaatacaatctcaagaggtaacaaaagctttgaattttactattgggcaatggaaaataagaaaaatgtgatttttaccgattgagatgataaagttcccaacttgaaacaagatcagaaggcttaagactgtaatttatgcagagagtaacacctgtaagaaaaaaacagtcagatataaacaaaagttaaaagatctgggcagagagatattagattaggggatagtgtctcgcttacatctcttaagaatctcgtcttcttccacaagaataaagccgcttcttttaaactcgttctttatttcctcatctgtagccattttctttcaacttcactctctcgctctctctgtgtttcctagagagagaagctttttgttgtgggcgactggtgaagacgaaggcaagtggcgggaaattgtctggtttagggcgggatgttggctaatgcccttttctctaaccttcttatttaatggacccgagttttaaatgggccttaaattttgaacaaaaacaaatgggccttgaatacgttaaacgttaaatgagtgaaaggtgaaaacagttcaacagaaactgaaacggttgactaattccgttgactttttgcaacacggaaaatagttcatgtagggaatttgaataaatattttggtcagactgaatttggctagattatcaaatttggagtatgaaaaacacatgtatataataaaataggctatttaccttattgcttagctccgaaaccaacattataaattatcacacaaatttgtagggaattaaagaatttggtttttggattttgtaagcaaattgccaaaatctatctaaatccagattttctagatttgttttttttttaaactatttttattattttagaaaatctacttttattacaattgtgaatgggcaataaattagattttggtaaataaaaaaactaaaatatttttacctattttctactaaatattttcccatgattttccttctaatttcctacaaaatttcttatacaaatgtaatcttaggaaaattgaaggaagtcgtccttaccattttcgtaccaattatttttccatgactttctttccaatttcctacgagatttcctacgacaatacatttcgtaggattttggtagaaaattttgtacgaaattttgacgactattttcatagtaatctcacagaaatttggtaagaaatatcttctactaaaattttggtaggaaatttggtaggaaaaacctatgttttcttgtagtcctacactagaaaaaatggaaccttacgaacactagggaaagtatttgatgataaaggcaagcttgtctgtttgtttaagcatcgaaaagacggagaagaagacgcaaaataaaaagcagctgtctatttgttggaccaccctatttcctcacatcgttccacttcttcggatctcattggttttggtggtgctacaccaactgtttttaaccgaacaaaggaaggttgtttggtttcttatgttgagaatgatggtgttgttggtgacttcatcactcaattccaattcaggactctccctcaagaaatccacaagctcgacattttccatattcgctttggaagtacggattgtcatgattggaacacaatatccctgatagatgcggaagggatacaccgtttgaatttcatagataatgaaaagtgcttcaataccgaagtaagtttgatttttttttatgttttagtctctatttatgtcacactaatgtcgttaacaatatcttcttctttgtgtagtataattttcgtacaaaaagattaagtcaaaacaatctttcactaacaaaatggtgaactatgtgaatgggctcgacgtggaaggtgatatcttatttttgaaagcatgtggatgggatgttccaagagagattacggtccctttcatgatttatacttattttttgaaaaaagcggttcaacatcacctcactatctacgatatggccgttattgccctgaatcatcgcaaaccccctaaattcaacctttgcaagatggtcttggaagataatgcggagaattcccaagaagatgaactttttttacgaaagacttatgagaagatagattcacggctagaggagtacccgcggttgttctttaagaagaatagatggtaaatgattggttaggtagttataaagacaataatggtgtagaaataaatcatgtcatgtcttttaggtgttcttgaatctctgtgtcagtcatttcctaatgagcacccttagattccaaatacagcttttggcctgattagtacgtaactactgatttgcggataaataaaaaagtattagtaactccatcttttgtccattttatttttgaagaaagatctttaatttgagcattggcaaagaagttccacttttgtcttgccacaacaaaattcttctcgttctttgtttcaggaggcatattcatatgagacatttgaaccgattctaaataaggctgtattatcgagttttatgaaaacatttttttgtaaaaactttaggaccggtgtccgtatttgacagacgagagaaaactcgtttataaacaaaaacaagtctcgacaaatcctatttataaaccttcaaaccccaaattaagtcatgtatattaacacaatcattctatttatataaaaagaccgcgggtatctttttctgtaaatgattttgactttagttcccacaccgcaaaacaatatggttcatagttccaactacacaatcttcttaccttccaagattccacttcttgaaaacaagatcattgctctaatcaaaccctgataatagagtctaaactataaagcagcaagtgttctaaactagtagtgaactaatgaaatttctggatatggttgtaatcaatcgcctgaaatagagagtagaaagcatcaaagtggtctaaactagtagtgaactatgcatttctttttagcaaaaaacaggttgttggaattgagaatcctagattaaatcatacaagaagaaaagcttcatgagaagaagaagatgtagaacagaggaagaagcatcggaggaagaagacgatgtcggagaagaagtcgtgaacaaggtcaacgacataagcaaagtcaacaacataaaggagttgggctttgttgttttgtaataagtaattgggctaattgttttgttaggcccaaatgagtagaagtattgtgttgtgttgttagtttaagatagagtctatgttgtgtaagagtgaattaaggagttggaagttccaacatagtagagtggctgatgtaagtcttaggacaatgatgtggtctagagtctaagtgtgtgtagtgtagcaagtggagcaaaaccactatatgtatgtgtgtctttatgttgtataatattatccaagccaatacaatgtagtcttaaaagtaaatgcgttcttgttctttctctctagaacaagtaaaccaaaaacagagtaaaagatagagagaaagtgagaatcacaacacaggtgttcatagttccaactacaaaatcttatcttccaagtaaacaagatcatggctattttctctaattgcttaggttcgaaaccaacattataaaatatttttgagaacttaaactcggatgcgtagcagttagcactacgttttaattggccgaaccactatgtttgagtatttaaccaaattttcactacacacttacacataattaagacgtaagaagctcttaaaaattaaaattatgaacataaactacctaaagatcaggtgtgagtaggcttgatccaataaacattaaaatccctaataatatgtttgactccttagaatagagttttcgtagatgtatgagatttttaatatggttaatagacataattagtgggtgctcgaactgattttaaagatgatatatattttggataatacattatatcaaattttataaaaaaaaatacaaacctttagaattgaccattaattattggccactgaacaaatggcgaaatgaaagtatatatgagacacatgaccagttgtgtttcgaaaatgaaattgtcaaaacaacattggattgatggaaacaaagggttcgaaaaataaagtggtcttcaagagaagaattcgtagtttttggctgagataataatggttctgaggccaccaatgggagctaggatcgtcaatataacaccaactactatgcaaaactgcaattacagaaccaaacaacttgttattgtcaaatatatagggtagaaataaaaacacatatttagtagaagaagatgatgagtaaaagaaaatatacccaattaatacaccaagacaatccatacttctttggtttcttgatacaaagccacatgatgcatggtagctaaacatagtacaatacaaaaggtagatcaagttgagttactagaattttcaaacaaatgaataggcttaattagtgtattgaattacttacatagtaagttgttggggcaaaggcgaatcctccgaaaaacccgagcaatccaccaaaaaatgggatgcatatggcaacgaacatcgtgaaagctgttccattgatccaatgttataaattcatatgttactatctaggagaattgatttaatatgaataagaacttaccaacatatagagtacgagtgatgaagcggagtttgaaggaaggagcgaacatcatcttctttaccaaaaaggtttcgagcatgtcaaagaccggcattgcgtatatttggtagcttccaatgacatggacaaccacgaatgcgttagcaatggcgataagccagatgggtttctccaacgtcatgagaatattgtcgtccacactgtttccaaagatatagtagcaaacaaatgcaacgggaaagtagcatatggcaacaacgatgtatgcaactactactcctttccacattgcaatctttgatggtttctcaggtgttgaaggaatagtagcttgtatctccaacacaacgttgtgacctgcatacgcaaatgccacatctcctagtgcattcaagaagttgaatacatttcctgaggttgtagatgctctagacgagtagtctacatttggatgaactcctttcttcaccgaggttgcccaagcgattgtcgagtagctgcatatattacaatcacattaataaatctcaaatagaccattttttaaaaaaagaacaacaggctatattgattttgagttgtacttacctcaaagacataacggcagcagcaagggagacgatagatatggagttaaaattagggagatgagcaagaacaaagtgtatggaagcgaagatcatgatccaatatgtagttcttatatttttgcaatcggtgcaaagaaggtcatgaatttttttcaatgacttccctcccgtaaccatgtacacaatatccacacctacttcaacgattagttgttgtggcaccacgatccatagtccgagcttctccccaaacgcgtgttggcctaattcgtggtacctgtcgaacctcttccctggaaccatctcgtgcatttgcaccatctgccatagtgtgtagaatgttatcagccatgacattatcattattgtcactccaggtcccctgccatcaaaattgagtgtaatattaatattgaacgtgtatatagagattttctaatgagatatttatatatgtagctagattggatatataccatccaagattagacatggcgtaaggtaagctgagtacaccagccccgaccatggcggtgacattgtgaaacgcagagtaccaccacttggcatttctagaggatgttatcggtaaccaatcgtctacattcttctgctttgtggacgcgtccttggttggagacgattgacttttctccatcttattttggctttgaagaacagaaaaaaatgtgggacacaattagatgatgagaaccaaaaggattcaagagcaaggcaatttctttcctgaggattgaaatgtgccttgtgacaatgattattgcaaagagttctcaatttatatatacaatttcatttcactatttttttttccttttatatttttagtgaatttcaaaaaaaggaatttattggttgttgctttatgacagattagtttcacgctctgtttcacaagatagccatgatcgttgttggaattgttgcggtgtatgatctctaattacttataccacatggcttttttgatatttttggctgatgattatggtataagtcattagtcaatgctcttttgcctaacgtgaaaagtgttttgcatgctattaatgaccaaaatagtcatttcttgattttattttgattcatctattgatctgtttctagtataactgactacccgttatatcaaaagttaatttaggggagaatatagttactgcaggtttacaacccacaccttcctcttttaatgagaaaaaaaaacaaatcttaaaccaaattacttttctttatttatatttttgtataatattttatcttattttaaattgattttaataaccttaagtgttattttaccattttacaaaatgtgagggtttaaaaacccacaaattgagtgtctttttcatgtttttagaaaaagtttggatcttttaacccatttttcccaactttccataatcatctaaagttttatgtataaatcttatcaaatcatttagaatttattttgtaatcatatataaatcacctagatatccttaaatcttaataaaatccctccaaatgtttagtttcaacacaccccttaatagttgactaatcacctaaaagacagatcatggtaaattagcagttttttttttgtaaagtagcttgcaatcattgtaaagtagttttaattttcatgttcaatataaaatcttcgataggaagacatctttgatctccgaaaaaaccctaagcagtaccctcaaacgcaagaaccttagctcttgataatgaatgtatcttcttcttcactccaacgaccccggagctcgtcggatcttcaaggttttaacggagtaagttcgacgtttaaggaaacgttcaccggatctccatggctgatgcttttaccgaaagacggtggttgtgtgctgtacaacccgaaagaaggaaagaagatccatagggaactgcgagactttccagggtctcgaatcctggcaaactcgggttactggttattgttgttagattctggatccaatttagttatcatagatgtctttagcgagaaaacgatcccctcttccgtctctagagtcgattgcgtcagatactagtaaggtcaggcgtgtgggagatagagtatttgaaagggaatataatggcccggaatatagtgcccgtgttgccactgatctgacttgtgatactgtgaggggccttttgtgggtagacgagagtggaacagattacgttgtggtgtggttcttcgacctccctggccactcttatataagcttttgcaagaaaggggacactcattacactgacattcctctgtttttccgagacgcccactttttggatggcttatcttatatggtactggggcgttactctctttatatctcgacaagtcgtcgttttgttaaagtcctagatctgtctggaccgcaaggtttcttcaaggacatcaccgagggtaataaaccattctcaatgctttctcgttatcactcgtgggattctagcattgctgttacaacctctggagaggttttgttggttgagagtaatccatggcagagggactgcttccgcgtctacaagtatgatcctaatgtagaactcccagattacgcctgccacactgttcttgaggttgattctcttggtggtgaggccctgcttcttgacttgggtttcactatgcctgctaatgatacccttggtatcgaaccagactccatctatttcacccgtcactaccgtccctgccaattgtcacctcgtgaccttgacatctgtgtcttcaatcttgtaaccaagaccctcaaacgctttcctgttcctgacgacatgtctcttatggatgctcgatggtttctccatgccagttaatattttctttctgtttctctttagttgccctttgtttcatttatgcttctgaataaacttatgatgtttgctttcaaaaatgccaccatgttagatttttctctttagtggctgaatatgttgtgtatcctctacttgcttctcccaaatggggttcccattgctggatgatgctgtctttcaatcacaaataacacctaaaatcacaaataacccggggcagtgattttctagacaagctcttaaccttcgaaatccaaagctggtgccttttctcgagggcgaaattatgagctgtttttgctttccaaaactcactggattttcgaagctggctattatatatagttggaggtagaagttgaaccaatatgccaagtcacctaatcaggattatatcaacaagtcaagtatttaaactgttcacagttgtgtttcttttgtctgttaaatgctctgtttcgaaacagatcatttcctggtcccaaaacacaaaatacacaatgttaacatacaaaagcatcataaactagaaaaacttgaaatagataataacatattacaggaagaatataccaaaataccaagagttatccttcacaaaaacctacttctaacccgagtgactcaaaagaatatcgactgatttcctactcaattacaagcgaaccgtcacttgctcactctggtgtgtgttcagaacctgagatgaacactgctgcctcccagaggcttcataaacctgcaaagcagtaaacagtcgaaactcaccaaaacaaagccaaagacttgcaaaagagaagtataggctaaggctataattgtaactagtcagtagttaagccctagtgtagagtctatatatatgtaaactcatgttgttaaatacttcaattgtagaacatattttggatattctcttggaattttacgtccacgccggcttaaagaacaagttgtttttcacttaaagcctaaaaagcatattctctagcaaacagagaagctcagaagcatattctgataatctgatcaatcatagattgatagtgtattcagtattctaatatcgcatgctatatttttgtgaatgtgcatttttgaaccaactagcagaatttaaactttctttctggataaaaactttaaacaataaaaagctctatacgtatattaatatcgcaaaaacttctaacatatcaacagagtttataaaataatatttctattatataatttcagataatatgcaatttttcagatgtcaattctttattgatatgtagctgttttgtcattataatataaacggtgataaaaaaaagtaataatctcatctgtacttaggtcgtgtagacttgttagtaaaaaacattaaataaaagctgttgtttgttgccgaagaaaaagcgagaaaactaggaaaataaaatttgaggaagaagaagccattagaggagtctcaaggtaaagatttctacacgcaactttatgtcttctctgtatgttctttatcctgtagaagagctatcagacgattaaagccctacgatacgagatcaatcgatcaccatcattcaatggaggaatcggtggcttcatcttcctcgcactatatctcaattttcacaaattaccctctgatttccgccgttttagctttcaccatcgcacaattcatcaaattcttcacctcctggtacgttttcatatctgtctaggttaaagaaacagactagttgtagaaatttgattttacaactacttggtgtaggtataaagaaaggagatgggatttgaaacggcttgttgggtctggaggtatgccttcatcacattcagcaacggttacagctttagctttagctgttggtttacaagaaggttttggtggttcacatttcgctatcgctttggttctcactaccattgtatgtttttagctaatcacttaattaattaatgacctttcttgattatatcacttcaggggatgattaagaatttaagattgtttggtttggtaggttatgtatgatgcaactggtgtaaggttacatgctggacgccaagctgaggttctaaatcagattgtgtatgaacttcctgcagagcatcctctggctgaaaccagacctttgcgtgaacttctaggtcatactcctccccaggtaagtatgtagtactaattgtgtcagatcacaccaagcaagagaatgattgtggttagtacttgagactatctatattttggtggcgtcaggttattgctggtggaatgcttggaatatctacagcagttgttgggtacttagtcatcttgttagccaagtagcttaagctgggaacagcaaaatctcgccttttctgctccattgtgtgtcaaggcgctgctaggtagtttaaagatagccatgacatgcaaatagaatttggaaattgagcttaatttctctgttttttttgctgctctgttcttgtcattgacaatatattttagttaggtttgctctagtaaaggaaacttgaaacgtcattacacagatctgtaaagtggtaaaatgggagcttgtgcattgaactacaacgaacatgatctgtttagattcagcactcaggagcatcaatactttaaaactcatcatctcatttcctcttaaattccatgactacaaagttttgcttatagagctaatgttgatttgctttatttcttttggctcattaaacacatatatattagcattaagttctgtttcctctggcacaagctagctgataaaattcctctaatgtgtgatattattaggagaaacacttagccttaactttcatacaacagatagattcattggacaaataggttcaagataaccaatgtcattagagctggtttagtacctctgatggagaatcatgcattatatttatttaaccgaaagttacctttgatcttcacattctatcatctccttcttgtcgtcataatcattcttaaacattatatgtatgattactcatgtatacaaccatcaattttcaaactacaaaagaattggaatttagccactgattagcaagatatttttcatggctactaaaatgattatcgattggccaccaaaatggttttggccactgaatttatttggttaacgtcgtgaccatatttggccacagccaaatcggtaaacatatgacctttttttacaattctgaaagatggatttatagtcgttaattgcgactcaaaattttcactatcatcatctatcccatataaaagaacaacaatatttctcaatttatcatgtgagactcataacaacacatctcaactttttgtttgacataatatttttcacccgaaatatatactatccgaaagagagtagatgtacaatcttgtcgtacatccaaagactactacaatattgtttacttgactaatacattttgtggtaatgaaaaaaaaaagacaaagaaaataaaacatgtaccatgtttattaaaattttcctatgtgctaagatctacatacattatgtctttatcgacaagatgattaagtacccggatcaatcgaaaactgttttctctactacactgttcgttttcaaataatgtggacattattcacatttttttgacatgacattattcacatttattttttaattttttgtacattaatccataacatattaacatccaaaggcaattataccctttttttttaaattagaaactttaaacataaatagaaaatgcgagtaaaaagaagtacataaatattgaatccataagaaaccaaaagcaatagggagacctgtcaaagaccacgtgaccttgtcagtcaaacccggacccgcttttaccctaacccggaccgacaaaacccatctctcgccactcattccaagatctttaaccgtacacgtgttataatctcaacaacaaaaccaccttcagctaaacaaaaaaatctaatctaaagttaccgttaaaaagtacaactgtagtagtcgtatcttaaaaaataccactctctcgggaactacattattaaccttttccccaaactctttacttcttccaagattccccctaattgttttgtgattgttcccattgcatttgcattattatcatcgctttactttaatggtgattacttagtcactttctccccacgtacacatgattaatctaagcttttaacacaaaccagatctgagcattctaataaaaacattaatttaaagtaaaaaaacaaaaaatagtgggtctatatcaatttatgctatttagatagaaaaaaacatagtgataattagagagttataaagacactatcattctcgtctctacaacaacccatctggacattaatgtcacatttctgaaatctctcaacttcatcatcaagtgggttcctatgagagtgacgactctttgattgcttcgccacatcttttatttttatccttctaagtcatttctctatctatccatatagataaaaaccttctaatagatctctgtgtcattttattcgtaagaatgagatctagtgtagaagataacaaaggatggataggaccagcgacaccggagatatcgaacggttttgagtttcagaaaggttcgaaccggacaccaaaccatcaccggtctactatggggaagccagcgccgtcaaaatgggacgatgctcagaaatggctttctggtgtagggtttgctcgtggaggtggtggaggtggtgacaagagtagtcatcactcaagaagtaataagccgagaaactcgaacgcggatgatcttagacttatagcttcagcttcacagagagaacgtgaaggagaagatcagtacgttgagtatgatgatgaagagatggcggcgggaagaccggaggttgagacgaagaatgttgattgtggtgaatctgtttggaggaaagaaagtagtattaatccaacggctgtgattagatccgtttgtgtgagagatatggggactgagatgactcctattggtagtcaagagccttctagaacagctacaccggtgcgagctactacaccggttgggaggagtcctgtgacttcaccggtgagggcttcacaacgtggtgaggcggtgggggttgtgatggagacggtgacggaggttaggagggtagagagtaataatagtgagaaggttaatggttttgtggagagtaagaaggctatgagtgctatggaagctcgagccatggcttgggatgaagcagaacgtgctaaattcatggctaggtgattaacgttaattggttaaatttatggttgattttaatatgtgttaatgtgattcgtgtttgagagttttttttttttgtgtggaattaggtataagagagaggaagtgaagatacaagcttgggagaatcacgagaagagaaaggctgagatggagatgaagaaaatggaggtaagatgttctgtctaattgtggaaagagagttgtcaacacgtgttcaatccgaatttcggttcagtctttttttagttttttaaaagacaaagtagtgtggattggtttgatatggattggatctattaattgttaaagagaaaaataacgttatggattgaaaaggttttaaaacaatgtgtgaacgtgtgtttaggtgaaggcggagaggatgaaagcaagggcagaggagaagttggccaacaagctagctgcgacgaaaaggatagcggaagagaggagggcgaatgcggaggctaagttaaacgaaaaggcggtgaagacatcggagaaagctgattatataaggaggagtggtcacttgccttcttctttttctttctcctttaagcttccctctcgttgttggtgtcaataattgtctattttcattagaatgtaatcgtatggatttagtgatattcaataactaacgcaaaaaaaaaaaaaaaagttttgtttggggaagtagataaaagaaattgagccaagaactctcaaagttaatcaaggtcccacgagtggccaactatccgcactttaattgctaacttcacttaaaactatgtcgctaaccttttaattgacacaaacacatttggggaaactcataatctttgatgtgaccggtaaagcaaaagttttgggctttttaccagatgtctgatctcgcatttggcccgaccccgcaattttgggcttctaagataaggtcaggcccggctttaaggcacaatgtaagcccagcagttcaaaggttgatccgacattaatttggtaacggaggaatctcaacttaaatgataagcatttacgatccgagctgacgactcgtaacgtgcgaagttaatgaggcgagatccgcggcgtgaagtcagcgaatcatttaactcgtttgattcgatgtatttgtataaataagagtcaattgacattgtaaaaggggatacacattgtactgaaactatactgaaatacataaatacttttcacttgatcactgttcgtctaacaagatttaagaccttcacgaaacaaccacaaaattctaattgcggattacgacatccacacaaatcaaataaagataatctcagatatgatggaatagtactagtacttgatagtgattttgattgtcaaattttgtaaagagcaaaaaaattgaagtctagaatgaaagatgactcatatgtttcgaccaagctagtcatgaacacaaacaagaagagaaatgattagttcgtgattgagagattatgaatattcataatgttctaaaacggtttatgtggtcccctaaacattatgcagccacaaaccgtgacaatcattttttcggacattgaaattagacattttagttttgactggccttcggcaatattaggtacataattatcaaagttaacatgactccaaaaattaacatatgttttttgatttaaatgatttgatggtaatattaaggttttcatgtcttagagcaattttatttgtggtttctagatataagtttcttaacattaaaacaacaaaaataatattatctaactatgtgagtttcttgaatagttaagaaattctctccaaaatttcctatataaggtattttagagatgactttttcactaatcaaaaagcccacacattcttttataataaattttctttctttaaaataaaagacttatgtttagaaatcatcaatgagattgttcttatgttccaagtgctccaacatcgactttcaagataatagtctttgtggttaagatgacaataattcgattaattttgggtgtgagtcgtgtgactatcccacgaaaataaaattgttttgccaatttgatggtaaaatctcacgataaaaactcaaacaataacagcctaccaaaaaaaaaactcaagaccataacatgttaaatttaaataaataaatatatttttggtttcaataatattgtcgtagaagttttaaaatattttagagataaaaataaaaagaaacacattgattaattacaaaagttaggggctccttatacctttttttttttcatcaaggggctccttatactaaaacaataaaatagagggggcgaatacaaaaacacgattttagagacctaaagctttgagctttcgacgagaaactttcttctctctctctctctccgccattgttcgttccctctccacggtaatctatatccacccgtcgtcaatcggaactttacgaactccttatcaatcgtattttcactttccaattctgagttctcttctcgtttcgtcctctcttcctccgtatccacgggtctcgctttcggtttctagggtttcgcggttctgatcacaagttctgcttcaattgtaagcgatttgatcgcaagtagctgttaaatcggtgcgtaattcaacttttgaaatctcaaggtttagtctctgcaattctgattttgaacacagctagctagtagcagatttaagagttcgtcaaattaggattttgggtttgtttgggtccctttctcaccgaagttctgtatggcggctgggaggaatataagatatccagaccatgaactgagagaccaggaatcgaattctagattttccaggcgggatagtgcttatgcgaacgaggattataatcatgttaggaacggtgctattgataatggaaagggacgggttagtaatctaagacacggggatagagatagaattaagtctggagctagacaggaagagaacaaaatggttagtagtgggtttcggttatcgaagagcaatccaggtagtagagaagtatttatcgatcttggtcctaaaagatgcgggttttcagctaggtctgtggacagggaaccaggcgagctctctagtgagagtgggtcggatgatttgattgagtcggaatcactggcgaaagttaatggagttgtgaaggaggtagagaatagagctcaaagtcctgtggaaaagaagagaaagttttcaccaatagtatgggatagggatgaccatgagagaagtaatttgagcagaaatgaaaaacctgtggaggtcactcctcttcctcccccaccaccactagttaagaggtcaagccagtcacctagtgtcagttgtggtggtaattctcattattcacctgcaaagagtgacatgcatcaagatcctgtggaagttggtgtttctgcggtttctatgcctgctttgtcaccttcggtagagatgtcctctttgtgtgtggtagaacagtcatcaaatgctgagcaggatgacaaacaagagcatgcaacacacctggaagaggatgaaaacatgccaacacggcatatatcatcctctaggtgggctgctggtaatagttctccaactgatgaagttgaaatagtagaagaagttggggaaaagaaaaggaggaagaaaccatttcccgtgcaggggagatttcgcaatacctctcaaacacctgaggtcggggagttagtgagggaaggttatagatcatctgattccgatgaaagggggcaccattctttaccgggaagcagagatgattttgaggagagagatgctgttaagagtgacaagatggaaatagatgaggaggaacacagaagagaaaactctgttgacagccttagtgaaacagattcagatgacgaatatgtacggcatgagacacctgaacctgccagtactccactgagaagtataaacatgctccagggttgtagaagtgttgatgaatttgagaggttaaataagatcgatgaaggtacttatggtgttgtttatagagcaaaggataagaagacaggcgaaattgtggcattgaagaaggtgaagatggaaaaagaaagagaaggttttccattgacttctcttagggaaattaacatcctcctttcttttcatcatccatcaatagtggatgttaaagaggtggtcgtgggtagcagccttgatagcatattcatggtgatggaatacatggaacatgatcttaaagcattgatggagacaatgaagcagcgttttagtcaaagtgaagttaagtgcttaatgcttcaacttttagagggcgtcaagtatcttcacgacaactgggtgcttcatcgagatttgaaaacatctaacctgcttttaaacaatcggggtgagttgaagatatgtgactttggtttggctcggcaatatggcagcccgctcaagccttatactcatctggttgttacgctttggtacaggtaaagtgcgtttttaccctattcttgtttataaaaaaattaagtggtgtttacatttacgattgttatttgaattc

SEQ ID NO: 125 - DNA, 98942 bp, Arabidopsis thaliana
gaattcgaggtggccaccgggaagagcgaaagtggagttgccgattgaggaacggcggcgacctaataagattgagtttccgttgagaatgaaaacgacgacggcgactcttggtatcgcttctcctgtcgacattattatcgaacacagtgaaaccctttcttgtcgtgttttagttttgttgacttaatttgagtttaaaacgatgtcgtatcggttatgcgtttatatacgtgttggcaaatgtgtcgccgtgtcggtgtgattggctgtacacaattatcgctgtttctttttccattgcacttgttttcattttatttattaaaaaatttagatgatattatataatatatgttctttatgatgttgccataacgagaacgattatgtaaaaaataacatatacatatacttttctgtttataaatgattatttttttagaaaaaatttatttctaaaatattgatttttttaagttttttatgcaatatttattggttagtattgatgaattgtaattaaaaaaaaaaaattaattatcattgttttttgagttatagaaaactgtaaaacataaaaaataatgtatttataatcaacatttattatgttttcttaaaaaatagaaggagtagtcatttgttagatagtaagacttagccaaattatatgtcatttactgtactttagtttttttttccgatcataagaatgtatgttaaaataacaatcaccaaagaggcacaaaataaattgtaggtccaaagataaaacagagttagttaaaaccagttactcctttcgtagaatttttacccaaaaaaagaaaaaaaaaaatcgtagaatttccttctcttttcttcttaattataatatatcaactgtttgttttgttgtttagtttggaaaggaagaaaattagcttaagaaataagaatatatttttttggggaaagatgactagcaccacaaatttaactacgccataatttactgcgttgaccaccataattagtaattaagcaccatagctaacaaaccatatataatcactcttcaaaatatttaactttgatcactgcaattattcattccttcaccttgttcattgatacaatgacggacacaacagacgatatcgcagaggaaatctcattccaaagcttcgaagatgactgcaaattgctcggtagtctcttccatgatgtgttacaaagggaagttggcaacccattcatggaaaaagtcgaacgcattcggattcttgctcaggtttcatcttctgtctattcgcttccatatgcttagatcatttgataagaatctcacatcgtagtaataagagatatagtcatatagatcaatcaacttatcgaaacaaatatgaatgatacgacttatttttgtgtggtttttaaatgtttcagagtgcgttaaatttgcgtatggctggtattgaggataccgcaaaccttttggagaagcaattgactagtgaaatatccaaaatgccactagaagaagccttaacgttggctcgtacattcactcattctcttaacttaatgggcattgcagacactcatcacaggtcatgatttttgtaatcacattacaacaaaaatattacaagtaataaacatgaatagataattctaaacttaaacattgtggattctaataataaacatttttattccagaatgcacaaagtccataacgttacacaacttgcaagatcttgtgatgatatattcagccagctattgcaaagtggaatctctccagacgaactttataaaactgtttgcaaacaggtctagctacttcatattgtatcattttagaaacatttcaattcgttttatctaacacaaaggtcgtatctgagtgttgttttctctatttgatatttgtttgtttatcgcgctttaggaggtcgaaattgttcttactgctcatcctacccaaataaatcgaagaaccttgcagtacaagcatattagaattgctgtaagttagttctaatgatgttaacatatatggattatatctcttaattttacttgagagagttaaaagtatatggttcttgcagcatcttctagaatataacactagatcagatctaagcgttgaagatcgcgaaacgctcattgaagatttggtacactccatctcaatatcttccatataaattttatcagcagagtaacttataaactaagagttacttatacttaaaggttagagagattacttcactgtggcaaactgatgagcttagacgtcagaaacctactccagttgatgaagctagagctggtattttaaatataattgtaaagtacagaaaagtttcactctaaaaaactatttctctttctttttcattcatttaggtctaaacatagtggagcaatccctttggaaagcagtaccacaatacctgcgtcgtgtcagcaattccttgaagaaggtattattttacctttaggtatctagaatatatgaataatcgttatactttatcttaagataatattgatattttgtattttcttggttagtttacagggaagccacttccactaacatgcactcctatgaaatttggttcttggatgggaggtgatagagatggaaatccaaatgtcacggcaaaggttagtcttttgatattttacgatttgaactcaaaaccaaccggtaatgaaaattagtccatggtcgttattatattactctaggtcacatctcacttgtaatatgagattcttaacatttactttttgatgaagaagatcttttaaaactgcaatcagaaaatttgattgtcacatattctcttgatatataacacacacttgaatgttgtgatatcatttgtccaggtcacgaaagaatatctctcttgtctagatggatggctattgatttgtacataagagaggttgatagcttaagatttgaattatctacggatcgatgcagtgataggttttcaagattagctgataaaattcttgaaaagggtaaatatatgcttcaatttctattaaatctttacttgttcatttacataaaaattttttgttctgaataaagttgatgttttttccccttaaaattctgaaaaagattatgatagaggaaaatcaaatttccaaaagcaacaaagttcatcatgcttgccaacacaacttccagctagagctcaccttcctgcttgcattggtaaaaagatttcttaatctcttgcatttggtaaatatctcaaaaccatgcatgttttatatcacatcccattgcagactttggtgaatcacgacataccaaatttgaaattgcgacgacagattatatgccacccaatctccaggtaacacaaagcctttaaatgtgctgacatatagatgaaacatattttacagaaatttctccatcctcttttgattaatttttcttttaatctttgtttatatagaagcagaatgaacaagacttttcggaaagcgactgggagaaaattgacaatggttcgcggtccggtcttacttctcgaggttctttctcatctacttctcaacttcttctccagagaaaactatttgaggaatctcaggttgggaagactagtttccaaaagctactagaaccacctccacttaaacgagctggaagtgctccttatcgtattgttcttggagaagtaaaagaaaaggtaaagatcataagcttttcaatcaaagataatataaagattcagatttagcatgtcaaaaccaacagattttcaaatttaatgatttatgatcatagcttgtgaagacaagaagacttcttgaacttcttattgagggtcttccttgtgagtatgaccctaaaaactcctatgaaacatcagatcagcttcttgaaccattgctcctctgttacgaatctctggttagcaatcttgattccatgtgaaacttgtgttaccacaataatccataatcataaaatttaacatcattcgtttttgcagcaatcatcgggtgctagggtactagctgatggacgacttgctgatctgattcgtagagtttctacctttggaatggttttggtgaaactcgacttacgccaggtgattttagtttgttttcttaaatcttcatgctttggtcctctaattcaataatatgtgtgattcaattactaggaagctgcaagacattctgaagctttggatgcaattacaacatacttggatatgggtacttatagtgaatgggatgaagagaagaaattagaatttttgacaagagaactaaaagggaaacgacctcttgttcctcaatgtattaaggtcataatgaaatatctattgcgtaaactacaagaaagagcaatgttatgttatgaaagttgttaaattttatttatttatctgtattttatttatgtaggttggtcctgacgtcaaagaagtattggacacattccgagtcgctgctgaacttggaagtgaatcacttggcgcttacgttatttctatggcttcaaatgtataattttcttatgcatgacgactttaaacattttcattaaaacaaaacaatgacatagatttgtttgttacttgcaggcaagtgatgtcctcgctgtggaacttcttcaaaaagatgctcgacttgctttaactagcgaacatggaaaaccatgtcctggtggaacgtgagttcaaatctccaccaagatattacattgtttatagcaatcactttataagtacatacatgagtaacatttttagtagtcttaagatctcttactactatctatttatttgaataggctacgagtggtacctctttttgaaacggtgaatgatttaagagccgctggtccttcgataaggaaattgctctcaatcgattggtatagggaacacatccaaaagaaccacaacggtcaccaagaggtacgttacacgtgaatttaaacatgttaattttgaagggaggttctaagaacttgtaacaatgttacttgtaggtgatggttggatactctgattctggaaaagatgctggacgttttactgcagcatgggaactctacaaagctcaagaaaatgttgttgctgcttgtaatgaatttggaatcaaaataacattatttcatggacgaggaggaagcattggtcgtggtggtggtccaacctatctcgctattcagtcccaaccaccaggctctgtaatggtcagtttccaaactattatttattgatcatttaaaaacatatttaatgattgtattatttgttttgttactaatgtcaatacggggttaaaaatatatatatatatatatatatatatatatatatatatatatacatttttggtgccatggcactagaccaatgagctattacgctaaaatgattgaactggtttgaccagggctctttgcgttcaactgagcaaggtgagatggttcaagctaagtttgggataccacaaacggctgttaggcaactagaggtatacacaaccgcggttctactcgctaccttaaagcctcctcagccacctcgagaggaaaaatggcgaaacctaatggaagaaatctctggaatcagttgccaacactatagaagcacagtgtatgaaaacccagagtttctatcttattttcatgaggcaacaccgcaagcagaacttggtttcctcaatataggaagccgaccaacacgaagaaagagctctagtggaataggacatctccgagctatcccttgggtctttgcttggactcaaacaaggtttgttcttccagcttggcttggtgtaggggctggtttaaagggagtttctgagaagggtcatgcggatgatcttaaagagatgtacaaagaatggccattttttcagtccacccttgaacttatagagatggtgttagctaaagcagacattccaatgaccaaacactacgacgaacaacttgtgtctgagaaaagaagaggacttggcactgagctaagaaaagaactaatgactactgagaagtacgttcttgtgataagtggtcacgagaaactcttgcaggacaataagagcttgaagaaactcattgatagtagacttccgtatctcaacgcaatgaacatgttacaagttgaaattcttaagaggctaagacgtgatgaagataacaataagctaagagatgctttgcttatcacaatcaatggtattgctgcaggaatgagaaataccggttaatacactaccacaacacttgcttacgtgatttaaaagatactattacttttgctgttttcttgttggacaagtattgatgtcattctttagtactagtactggacctctaatctgacattgtgttgctgtttgagcttgcacttgttgaacaacacggcgttcttacaaatgagaacggcaaatagtttataacttctcacttggccaagtcaaaagtaagaatatttgtctatcttttggcacaaatgatttttttaggctccaattattaaataatgggtaaattacaaccaaaggaatttttttttgcaatttccatacatccacatatttttataatatagatatctaaatcacatcctgtaaccataaacataaggtaccttttcatgtttaaaacaccaacttgtggtccaaggttaatggatcaaaatttgtgtttaaagtaacttttagtcttctattatttctagtttcaattgctttttactatttgctttctaaaaatactatatggtagccttttacatgtctgaatttaaaagttttcatgacccaaagcatattccttaagaatattatttgatcgtggggtacatcgttttttgtttgtttgttaagtgttgtgcatcttatgattttacaaaagtttattttctcatacaagtttcctaaagacgtttattagtcaactgtcaaaaataaccatatcaaagaccttatgtaataaatcaaactgcaaaattgttaatacctacaacaggcagatccaagatatatcttcatgttaagaatgaaacaatctaatttactgatgtccaatagtacatcgtcttttaatggcaaaataatcatagttcctaggtcatgtatatagctacgaggttaggtgggtggtagctccgacatccattttaccatccacaatcggctgaatcattgaacaacattgttgggtgagatcattggcaataaaccatggaatgatgtcataatagtgagataaacatgcattcttgggtcctataaataaacatacacaatcacatattgtgaagatgatgttgcctgaaatgattgaattcactttgcctttttatctttttgagtcaaattgtggtttttggttgtcgtacaaccacaatccctaccgcttttcgacaaattgattccgcgattgataaaatgtgatttgtatatcaaattcaatatagaagaaactacatgttctttaaaaaatatgaaactataattactttataaaaaaaaaaattatagtttttttttatgttgtcatatataaatctaaaatttacctgacagagactttatatgacctttttttataacttattgatttcacatcatctttctcttaaagtaaaatagtaatcttaaaaaagatgcctcatgtgtagaaaacttcagttgaaaatagagaacccaatattgtaagttagctagtccatcgttagaaaaaaagaagaagcaagccagtccatcgtttatgcctttgaaacttcctttttgaagcaacccgaaagagtagagtttagaaataaaacaacaccggtctatttttagtactacgagttaaactatatgtacgacaaattcaaaattacgtgaaatcaataaaaagaaacattactcaatctaactcaaaaaactgaactaaacggataaatttgagaaggtcgattactctgttgatgacgttaatagcaactcatctacgataatagtaaattaaaacagtcgctagatgtcttaaggtattatcacaaatccattgcattttcattttccgatggaactaaagcaacgacaaacgttatgcaacatagaaaacttgatttacgacgatatcttaactatttggtttgcaacataatagtagtaaccggattttccaccatgtatgatgtatggaattggagaaaaatgtatgtgtggatagtataattttacatattttaatgaaattagatgtgcagaaatgtttacaacgaattatcctcggcattatactaagaagataaggcataatcttcatatagtattctaaacctaataaattatacaagataagatgaaaaaagtatatattcagattcccgatacgtttgttatatgaagaaattttaaaaacatattaactgattctttttgtcctgtggcaatttagatcaatatgtctttgaattcaataacattcggagaaagacatatgatccattttttctttcttcctaaattgacaaagcagatttgtttcatagaattattatttttttaactaggtgatacactaataaacatattttaatttaggaagaaagtaaaaatagttaatgaataatacgattttttcctgctgtccaaaatgaataatacgattttttcctgtgtccaaaatgaataatacgattacatttatttaaagtatagcaaatatgtttttactggggtactattttttttaataatctattctatatcaaatttgaagtcattataattattctattttgaataatttaattctatgtgatgtagaatttctcttgaataagatttggaaaatatataaaagtaccatagagattctgtagatcaattttaattgagccaagtgttgctttgtcaaaaggctaagtgaaatatttcatatggatatacctcttttctgattattttgaaactaattaagattccacattaaaatattatacaatcgaaccccggatcaatttaaaattcttagtactaaaacctctgagaatagtaaattaggagggatcatcaggagaataatatcaaactctcttaaagttattgattcacaactttcatgcaatagtaaactgacaaacaattttctctaggtaagattacatgcagcttctcatttcattttatattatttaacattgcaagaaattaaaggtttactattcaaccataattatgtctattaataactacatattcaaaaaaaatcaaacactaaaatatgtattataaaattggcaggtaaaacatatgaagactttatatacaacacacgcaatatacataatgaatagtgtctttaacaatgtccaaacacatggaattattcaagtagaaatacatcacaatcgcaaaatacctccaaagcaacctttttctctgaggatcgtgatatatattctcttctcaacgattcgaagataatcgattcttaacacattggttggcttgtaagaatccgaatccagacacagggaaagggagacttcattaatacatcgctgccttgacggcatatgcttccacatatactaatttaagttagccatcgttgttactctttttgaactgtagataattagataatttaatctagcatgtattagtacatatagcgtagacatgcatgcatgttggtaaaattaaagttaaataaaaacaaataaagactgtgcataaccttagatgtgcgacatacacgtactttcctgaaggtgctagctaaataagtatatattctttagacttcaatagtattgtgcaaagggcatctgcttaagtctttttggtgaaaatacatattctactagacttccaataactcacatgatttagtggtagctgatacaaaacgttattaaaaactggtccaatatcaaagaaatgtatgggactcggcttataacctcctgataaaaacatatatatactttatatcaaaatattagcttatttatttccaaatataatcttacataatacattttttttgcaacggatacaacaaccattttgttaaaaaaaatcgtatagttggtacggttgcccatatttagattttagacgtataagcagtgcagttacacatattactagtttaaaagttattttcaaaaaaagttaattttgctcctaatgtgcgttaatgaaaaaacacataatgaagatggaggagcatatttcttatatctagagagactcaacgtacagatattctccatatattctaaaattgggccctatatttttctcacgacatcaaagatagtatagtattgaaggttggtatcttattcttacaaaattgattttatcaggttttgttaaagtttcccaaatgatttagagttttctgatttgattaacctactgttctacataagtgtacatcatagattcactaagttacatgtcaccggtacatatacctcatattcactaaattacatgtcaccactacatatacctcataactgtttaaggacaaaaaatgtggaactgatgtctcctaggtggtggaatatgtgaagctagaaaacaaataaatgcggtccgactcagaccatcattttcctcttgtctcattggttttaaaattaaatattatattataaaatctgttgcagtattttttttaatctcaattagagttatttatttaggtctcaacccatggtggggaaaaaaacagctattttaggtaaatttagattacaaaattgtatagtcaatatcaataataggttaaagttttaataaactgggtgaatcagtttttgtttggtcttcttggatctttgtttggtctcaatattttggattacatataaattccatcccgactattatttgggttttgccgctggactctataacacactgattttagttttatatgaattttacgttgttttacgtttgatcatgaactaaaaattcagcaatccataagaaaatattttttggactagttcgaaactcggccagacaatactaaacctattcacatatttaactttttttttttttggacaaacataattaactttagtaagtgttatatttttgtcaatattaaactagatgtggtgtttttaattgtgggaaataaaattaaagaagcaaagttccatgaaatatggactttccgtaattggaaggccgccatatgttgccttcatttgtattttccttttattgacccttttgttttcttataagataaatatatatataactaattaggcagaagctgagtggcattagttagtgaaatatatttatcattatcccaaattcctctagctgacattactttgaatttagaaatttcttatccgcaaaatttgtactaatattatgaagtagtacatcgaatagaatatatattggtgcacattatgatccactttcaatgccatccattcgaatggttgctcagaacgtacttgtagaaaccgcgtgcataaagtttcatatgagcatcgtgtgctttgttatttaattttttcttccctaaataatcagacagaaaaattcataaacttctttaataaaaccatccaaaaggggattatactacgaaaattatggcatctaaacgcaaagtttaatatatttttagtaccaatgcattgtaaaagaatggaaattaaataaaaacaatatgaaactgtttgttcccttggacaaaaaaaaaacttggtatgactatgatttttatatgcgcttttgtaattgcattgtaattttgtcgatatggaagtggattttaaagaacattaatccatgatctgataggtgaaaactcacactacttgactgctatataacatggtttggtagtatctgcatttgtaatgtgaaactatgaaatcagaatttgattggtaattcttcttctgcttcttttttcttgattctttaagatttagtatgtgtttcaaatttttcattgtcctccgaaaaaatgtagtggaaatcgagctggtccaatctaagttcactcaccttttgtgtctcttggcacctaatttctttttggtccatttcagctatcttcttccttttccacacaaaacattacaaaatacttactatttctagttctccgatttacaatacccaaattacccttacccttgcccctcatatagttcgtataacaactttcactctaagatgaaacattttgagtgttgagaaaggtatatgaagctcggtagccggaggaagcacggtggatatacactggcgagaatcaggacggtcccacacgagacaagatttacctctcccaaaagcacaagtggaaggagcataggataaaaattagtacatgaaattaggtttcaagaaggatatttgagaatgtgctttgtgaggcatcgtcagtaggagtaagcaatccagtcaaatatattcttctttttttctctgcctttgcttttgtccactataaaacaaatctcatcctcctctcttgccctacactcacaaaacaaacacactctcttcttgatcattttctcttttgagtttttgagtttaaggacttaaaagagaaaacgctatggtcaagttcacaaagcaattcgaggggcagcttgtgcccgaatggaaagacgccttcgttgattactctcagctcaagaaagacctcaagaaaatccatttgttcaccaatggagttgagaagaagcacacagaaacttctctcatcaaaaccgttaagtcctctttaggaaggctttccattttcggtaataaggggcgggaacaatctcgtgtcatccaagtactaaaaataaacttgagcctttgtgacttttatttatcaactattcatgggtttgttgtgttaatggttttgatgctttttaaacaggttcataagaagcttgcttcttctggaagtaacaatgacgtgtatgaaacggaacttctggagaagattgctgatgacactgatgctgcgaaagagttcttcgcatgtctggacatgcagcttaacaaagtgaatcagttctacaagacaaaggagaaagagttcttggagagaggagagtgtttaaagaagcaaatggatatactcattgagctcaaagatgctttcaaacaaaagcaagccaatggagagtctactcaagaatcaaaagaagacgattccatatcatgcaccatctcttgcggtaataaaaagattttattaaaaatatatatataaagacttgcttgattaataaagtagacctttaaacacaaaaaaagaaagactagtgtttttatgttatttaatcagactagtgtttttatgtttatttaatctctttgtttaaatgaatgattttttaagaattggctataactatttgctctgtttctgaatacagagtacgactctgttaggggcagaaccgaggaaatgcaacttcaggtatcttgcttagataatttggaggataatggggaagaagcattggagtctctgggatcagaagaaccgatcaaagctaacaacgaggactcgaagctgaccacggtttctagtcgtgttttcagctgccaagggaagaatgtgaagatcaagattccattgacaaatccttctcgtacattctcagctatcagttacttgataaaccagtcttcatcgaagaaaaatggtccagatggaggaaataagctgcagatcagcaagaaaaaactaagccacgccgagaagatgataaaaggagctttgacagaactctttaaagggctaaattatctcaaaacttacagaaacttgaacatattagccttcatgaacattctcaaaaagttcgataaggttagtattaaatcagagcaattcaagcagagtttctataaagtttttttttcgatattcgattttaaaaccagcccttttatctttcaggtaactggaaaacaaatccttccaatttacctcaaagtggtggaaagttcttacttcaatatttcagacaaggtaactaaaaaaaaatctacttaagatttttgtctttcaagtttgtgtaagcggaaaatcgatacctacagtcttgtcttgtcactttaatatgctaagcaatatggaaagagacaaaatagtttttcattattgttttgggatatgacaggtgatgattctatcagatgaagttgaggaatggttcatcaagcacttggcaggagaaaatcgcagaaaggcgatgaaatatctgaaaccgcaccaccgtaaagagtctcactctgtcaccttcttcattggtaagatttttattgctttattctttttaaaaagtatttacctgttgctatgacatttttatgtgcacttgcatacacaaaatctttttcagaccaacaaaaaaaataaaagcctttggaccccatcacacacatacacattaggattccacaatgtaacctttaatctttgagtgttgggtggacaactaagagcatcacattgtgttataatctctgttgcataatatgatcttttgtctgctaaagaatctttggagattttaatcaaatctgtcctaatatttaatctctaatcaggtcttttcactggttgctttgttgctcttcttgctggctatatcattgtggctcatctcactggaatgtatagacaacactctgcgaacactttctacatggaaactgcttatcctgtacttaggcgagtgatctaattaaaagcactgataaaattttatgattaatggtaatctataaataggagatatttattcaatagaagctaatggcaaattttcatgtgttctgcagcatgtttggactcttgtttttgcacttattcttatacggttgcaacatatttatgtggcgaaaagcgaggataaactatagtttcatcttcgaactcgggtcaaaaaatgagctcaagtacagagatgttttcttgatatgtactgcttcaatgtctgcgatagccggtgtcatgtttgttcatctatcacttctggaaaaaggttactcctttcgacaagttcaagtgatccctggccttctactactggtaattatttaccaaacaatagtcactcttcatcaagtgtttttttattctttagtaaaatttgtatacttaatctgtttgctttttttttacagggtttcttgctgatactgatttgtcccttgaacatattttacaaatcgagccgttacaggcttatatcagtcattagaaacatagttttttcacctctttacaaagttgtgatgctcgatttcttcatggctgatcaactttgtagtcaggtaataccataaattacatttccatagactaaaacagagtaaacaaaaaaaaattgattcattccatagaccctgaatcaaaatcttatctttgacaatgggctaactctactttcgcaggtaccgatgctaaggaacctagaatacatcgcctgctactatataaccggtagctatgcaacacaggactatgaatattgtatgagagtcaaatactacagagatctcgcatatgctgtttccttcctcccatactactggagagcaatgcaggtaaattaaaaaacactaaacatcattctttcttccccaagttactgtttcttctcttgcaagttagggagaaaatactgaaatatgattttgaaacagtgtgcaaggaggtggtttgatgaaggtgaaacgagccacctagtgaacctagggaagtacgtttcagctatgttagccgctggaacaaaagtggcttacgaaaaggagaggagccttggttggctctgtcttgtggtggctatgtcaagtgtagctacaatttaccaattgtattgggactttgtaaaagattggggtttacttcaacataactccaacaacccttggcttaggaaccaactcatgcttcgccaaaaatctatttactacttctctatggtacaaacccaaatcttatatccaaaaatctcaacaagaaaatgaacaaagaaaacaaaactagtgagaacaatttgattctcctcttcaatttttctcatacttatgctccgcgattcattctgatttcttttgtaggttctaaatcttgttctgaggttggcatggctacaaacagttttgcactcaagttttgagcatgtggattacagagtcacaggattgttcttggctgctcttgaagtcatcagaagaggacaatggaacttttaccggtaaaattaatctccctttaagaatcttatttggaatcagattcaggatatatactgatacttgtgtggacaaaatacaaaacatatgcagattggagaatgagcatctaaataatgcagggaaatttcgcgctgtaaagacagtgccgcttcctttcagagaagtggatgaagaagactaatctgatctggtcgatcatcatatattgtttgcttcgtcagatttgaaagaacaagagaagaaaaagaagggggaaggatttgttctttcttgatcaaccatattttgtgatcagtgatcaagaatcttcaaaattaatattattcttgttcagaaattgatgtaactaaagaattctcccatttgttttcccatcgttcatcaccaaaacattgaaggaaaaaaacaaactaaaagagttatatctttacatcaacaatcgccatgttttgagctaatatagtcccaacctactcgatcgtaagccttactcatctcgcaaccaatcaatcgagattcgacatatgaattagaaatactactaatttatagtttctgtcgaataattgaaatcataattcacatgcacataaattctagaaaatattattcttcattagaattgagaatagtttataaagaggaacataaaaattaaactgtgcaactaaaagtgcagaagcattgatgtaccgctggcccgcaaacgccttttccagtcttgtacttcgaactacacatatcaatacatggttgcttttcacatggtgctgttaattgaaaatattcatgacacagttcttgtccttgtgacataaatttatcaccagccctaatataaatatttttgttaaggcaacgagttaaagaaaattatcaaataaaagagaagatatttgaatatacgtaatgtggattcttagtttaaaatattaatgatataatatgtgaaagtgtgaatcaaacctagaacgaggacgcatgaagatagcaagaacgggagttttagagatctttgatgatataatcgaaatgaaaacttcaattaaaagtgatgggtgtgttggttcgttatgtatatacacatgaatacggtatatataagaaattagatgcatgtactaactataaaagtagaaaagaaaattagattctgaaactggctaaagatcagaatgagtgacacatgtagaaaagatctctcaaaattaattaaagtgaaagttgactacaagtggtcaaaacatatacgaagatcataaatgcaaatgaaaaaaaaaaacataatagaaaatgtagcaagataaacaataagtcaaacaaaaaacaaaaatttttaactaaagattaaaacaaacaaatcaagtggtttaattaactatagatttcacgactttttctaaaaaacaatttttaagttacgatttttctgattattgtcttctttcatcaactacaaatcacagtattaatatcctattatataaagttggattttttaaaagttgttatcttatataatcacgatacatgttaaataaaacattgaattttgccaagtatcaagttaaattttttattaaatttataagcaaaaaaatagaaaaattatgaaccctattggaaaaagaaatatatccataaataaaaagaatatgtgtttatatattcaatatatatatatattttacctttatctcttaatttttacccgaaacatagtatctaccatttacttagtttggctccaacaatccagtcaatacagagagacaaggacggaaaacatggcgaatactgccgccggttggtctccggttttggctccaatctattctccggtaaacacaaagccaatcaattttcacttctcagcttctttctacaagcctcctcgtccattttacaagcagcaaaaccctatatcggctctacacaggtcctaagcttatatctcttctccttcacgtttcctttcatgggtctcttctcatttcttcttcctcactctacaatctccgaaagacgtttccttttgttgtttctctaggtcgaaaactactcgtgtgatagaggtagtaacaccaaagcaaaggaatcgttctttttctgtttttggatcactcgctgatgattctaagttaaacccagatgaagaatcaaatgattccgcagaggtattaatgaaattagttctttttatggtgattgagtcttctcgctgaaaatttggtattttattgttgttctgggacaggtagcttctatagatattaagctaccgagaagaagtttgcaagtggaatttacttgcaattcatgtggagaaagaactaagcggcttatcaataggcatgcctatgaaaagggccttgtctttgttcaagtaagtctttgattctgtttcccttgcgcataccacatgtttgcttgattgtccaagagagatgatttggttgattgattgctctttcttttttcctttggcagtgtgcagggtgtctaaagcatcataaactggttgacaatcttggtctcattgttgagtatgatttccgggaaacctccaaggatttgggtaccgatcacgtttgattagctacgttgaatcaagttttgttcttttttctcagatgtgttcttttatgaaatgagaagaagtaagctatattccgcaaagaatacaaaagaatgtattattttgaatcaatgtattggtatacatgggaaaaaatgtagctgttcgagtcgatacatctgtgatattatgagagggagagaagttttaggctgtcatagcaagtagaaagaggattactagtccagtattgagccacattactgctcttcctttaagctgatttaaggcatttcctccattctgtaaaccagaaaaataaaagaaggttagaatcatataagcatggcagtgattggggagattgctgtttagtattgaattgttaccgtgtttggtgatggtgctggagccgtgtcctgtggatctgttagaactggaggagatggagggcttgggggaattggtgctggagctggggcatggtgatgccttttgtgtttgtgctttctcttgtgcttggtaggagccggtgctggagctggtggtaaacttattggtgatggcgcttgtacagggggtggggaaactggtgcaggtggcggtgaagctggtgcaggaggtggagaagctggtgcaggtggtggtgaagctggtgtgggtgggggagacgtcggtgctggtggtggtgatacaggtggtggtgagacggttggagctgaagcgggcgggctttgtggtggttgtggaggcggagttgcggggctgattactggtgcaacttttggagctggtggtgaagttggagtaactgctggtggaggtgtaaccggagatgctggtggctgcgcagctgaaacgggtggagtagtggtagttggaggcggagcagcagtggttggaggagcagcagttgttggaggcggagcagtggttgtggaggttactggtgaagcagcaggtccttgtgcatttacactaaaggaagagatgagagcagaagccaaaagaagagaccaaatgattgaatttgattccattgtgttgtggaggaagctacaagaaacaattggtaaagtattgtgcatataaaaagctgtgagatattgagatctcttcaagtatgaatgaaaaagtttggtgcaacgatgagttaggtggtttaagagatccagtcttcatcagaatgctacgttgcttctaatgccaggccattagtacgtacttatcaaataactgacccaaataataatcagcgcttttaataaaacgtgttaatcatcaactaaatggggccaatacttccttcggacctaaaactggtaaagagtctagatcactatcaagagaggtttggttataaacaaaaattaaagcaaaacatgtgttcatatagaaattatgcgtacgctacaatcaatggcattacaatgaaccaacctggtattcagattttaccaaatgacaatggacagaaaaaatatacaattttgaacagatcagatgcaaaagttgttctacagacagaaaaagggtaagacttgatgcatcttgttgaggagtttgggaagatgatgatgatgatgatcggtaggagtaggtggatctgagttcttgtctttcttttttctcctaagctggaaaaactgctgcattgtctgagcgcattctgattcaagaactccgcgccggattgtcatcttaggatggaatggatgaactggaggtggtggcttttctgaagcctctgatccatttccttcgcctccagggaacagcctgaaaaacatcatttgtttcaggattttgactctacaatgttccagaacatttttcagtttctgaagttatcggtacctgatccagcttccatctgctccgagaagcttattgggagcaccccatacaagagtgttgacccttgcttgaagtattgctcccgcacacattgggcacggttctagtgttacatagagcgttgtatcctgttgggagaataagcaagttattgcaaatagtttccctgactaatgatcatttcatttaactttcccaaacaattaatcatcagcaccccaaaacgtaattcttttttggtatactcatatattgttcctgctattgcaatgtaacaaaaaaatgtatatttgacccaacagaggtgttttagagagagaaagagagaagattaccgcgagcctccatgaacgaagtgctttagaaccctctcgaatgcaaatcatttctgcatgggcagttgaatcacgaagctcctctactctgaaacacaaaactatggttagatgaatccagcgggagaaggggtcaaagtaaattaaacttacaggttataaccacgggcaataatctttccatcatgaacaagcacagcaccgacaggtacctcccatgtatcagcagccttcttagcttcaactaacgcttccctcatgaatatttcatcaactgttcgtctttcagcttctaccttgtatgcttcttcccactcctcaaaactatccctcacaacctgtttattcctctgaagtttcctttgtatcaacgcagagtctgcggatacagaacctgtttcttcctgggacttcgcacttagaggttgttgttgttcaacctgctctcttaagctgctactgccggataccattctgggacggggtactggaggttccattacagcaggagaccgtaggtttctacctggaaataataacggattttgacctgcatccattctagggtagcgtcttccttcccccacagtaaaattttgatcactggatgcctcggtaagactagattctgaagattccttaataggaggagatcttatcaggttccgactaggcagtttcattggaacctctgtcaaagctgtttcaggaagacggaactcaaagtttccaccttcttcttcatccacaccaacaatttgattaccagatgtggaagacatgcgattcgatactgagccaccctctaatattgtggaagatggcgatgataccacaccttcatgccgttcagatcgctgcttcagttttgtagtgccgggatattcagattggcttctaggagaagtttgaccaacctccacctgatgtagggaaggagcttcttgtggcaaaactttatccccttttgtgttatcatcactgcttccgtcatgctcacgtccagaaaaccatgttgcactgctaactgattcgttgggtgaactccttccagcgggctttgcactcgagtcagggcttccagctcgggagccccacctaagccgagcaatatcagctataacattccacaacgacctaccatttcttttaaaaatagcattccccactgctgcattgccttctgtggctcctggatgaggagttccctgagcagaatccgttacccacatttcatctgaaggtccctttgctcctgaaccaccagatgatcgccttgagtcccgcctcttcaattgattgctttcagctctttgctcctcagtctccggatttataactccatgtttggcctttttcacaaactccccaacatatttctctgatgcctgttccaaccgatgagcagaacccatagcatcttcatgtgacgtaaatcccatcagttctccagcagactgactattaacagaagctcctgctcttggatgttcaaaggctgtggtataaccactttctgaagttccatgggaaatttcttgaatggaaactccaccagttctgtagctttgtcctgatcttctgcttaccagctgagaagaaggaggaatcagtgtcgtttcagatccttgcatttcctctgaaaccagatctaccagttgtaatttagttcgcgaggccatcaaagatgattgtgaacttgaggcctcttcagatagctttgactgataactttgcaaccctaaggtcgtttgaccatcttttttcgagttagcatgatctaacctagagtcttctttctgagcaccatttttttctactttgctgtccgattgcacagccgtagtacttccttgaccaatcagcctcttctcagattttctctgaatttctgtataccttactgcatcactagtatgagatacagacacagaagttctgtcagattgcgtcgtttgcaagggattatgttcaatatgataatcttgctgcttcctttcagattgcaaaccagaaaccaagccagcatgtacttcttggtttctaatctggtcttctctttgcgagacatatgtatttctgatgtctatgtcatgaatttctgaactttcagaaatatgttcagtagtccttctcgtaccagcttgcttagatatcctttcttccactagaggttgctgattatttgtcacctccggaaaattttggagcacatttataccttcctcctggctactgctatatttggttcttcttcgcatttcagatactctatcctcactgctataacgagtctccaatctttctttcaattgatgctgagaactctcaatgttttcgtttccagaatcattacgaattgagtgaactctatagtcctccctttcattaaagagcttttgattttgggaactggtctctgcatcgttgacatggacctcatgaatttccatatcttcttcataatttcccgtagattcagacactctattttcagtttgactaaacttttttcttcttcgctggttcaaagtcactgcctgatttgaattttccccttcctcaaaaatctgcttctgataccttgaatccactccagtagagctctcatctctctttttccttgaatgcatctgagaggcttcctttctagatttcaatcttttggctgactgatcaacaaccttcttctctgaacttctcacgttttcgcgataaatctctacatcctcctcctgatcttcagtatcactctcaaactcccctgaagaagcaagggaataatacgatgaacaactcgaactctttctccttcttggccgaacttctctttcttcatcccccctataactttttccaatatactcaccagtaaccaatttagaaccacgccgagattcactctccaactcagaacttttctttctcctcccacaatgttcacaatcatatctttcatttaacttcacatcttccttaatctcctttcgcctaccaaacccctcaggtttctttactctttgagaaactctcccattaccataactattacttccttcaacactaacctttctcacattccccactttcttcttctctttaactctactaactaaattccacttcctctcctcatctatcaattcctcactcaaaaacgaaatcatagcttctacatcatctgaacaacttctaccaccacaacattcatcagattcttccaaacacctaagcttaaagctccgatttttccttcttataccatcacaagaagaataaacctcacaacccataagtctccctccacccacaagtaacctcctttgaaacgaaggccactgaataagcgtagattgtctaaccccataaagcacaaatccagggtttatcaataccttaggcttaacaaatgaagaagaagatggtgttgaacaacaacagcaacagcttgagcgagaactaacacagtaacatctcgaagatgtatatgcttttgaaagtttgtaactttcagatctctcagggagcaaagagcagtaatcttgttgatttctacttcgaatcggccattgaagtgagtttgtgtatgtattgaacatttttgttgaattagaagaggtaccttgtttcaaacatagaagaatctattgaaatttcattttgaaacgaagggaaccattattgtgatcttcgatgagatttaacattggagatgaatatgaaattgtgtgttggatttgcagaggaagaagacaagacaagagcgagtcgtaaaataaaccggtccggtttgattgagttggtaaaattgatttgaccgagttcgagattaagattgggcctgtataagatgttgggcttcttcagataaactcgtttagctatgtttggaaaacagaaaatttgtttcttgtaaatttggttatacaatttttttttcctttgaataattctataaccaaatttacaagaaacaaattttctgttttccaaaatcgaagacctacaaaaaccgtaaaatcgaataaaatttttgtagatctttaaaataaaatatgaattttctctgttccaaacctataatctcatttctcactaaattactattttaaaacggttaaaaaacgatattaattaaacgatatgaatttactattttaaaaagaaaaaaaaatgattaaaaaaaatatcaaaaaaagtaaacgataactggtacgtaaaatatcttgaatgattgattgtatttgtatccattaacgcagtttattgagccaatagctgttataatattgtgactaaactaatgatgtttgataattccattaagacataatataataacatagtgacgtcgtttatgtatattaatagtgttgttacgtgacttatgtgcatgtactaatgtacgtatgtatggataatagtacttaaaaagttggttagaggtagaagatagctaattataagggacaggtaaggttttgtaggtaatggcatgtgttggacactagcctattgggctcctctctttgccctctccatttctatgccaaagggcaaagtttttcttatctctttcttttttgttttctttttccatttttggtcttacttgctctctttttctttcttcttttaccttgtctttatttgcctttgtgcgtgtgtatgtgtggtccattgtctacgcttgtgttgattcattttctttcatctgcaacttagtttttcttttgtatattggatggaattaacacacaaaaaattaagtttttaagaaatcaaaaatagaaaccaaaatataataatgtgaaatttttaaatatttcagacgactacatatacatatttctatataggcgagataacatggatcttcattctagtgttgaacaaatttagaccaccatcaatatttggtagtttaacctaacatataggtaacactcattagaacatgctacaaatttctcatgataaaaaatgggattttatcaaattgtttcaaatttggttgtggaggatcttaaagttgtagtcttgtagatattatcaaaaatgggatttggttgtagatggcagggtctcaattatttaaaattatgtgtttgcgtttatatgtggaaaatatatattctaaaattaatttttaaatgctgaacatctttaattttaataactattttctaaaaaatataaacaacatttttttaaaatatatatatatatatataaaaacaacattgatttatgcaaatgaaatattcttcttccgttttccctggtgtgcaatttacaataggcaatagggtttttctgaaatttttatggttatggtttaaatttgaaaagatacgcataacacatttaacacaaaagcaaatgaaattatgaacaatcaggaccagtcttttatactttgttgtatctaggacaaaaccatagtgcattaacgataaggattctatttattccaaggagaaaaatggatttacttgtggagatgtccgtgacttattatcctaagttgctaacatgttctcttttctccaaagacatttgattcgtttttttttataactgtgccacatgtgatatgtgaacatcatcaattcgagatttgcaatttattgaacagacgctctgttcaaatctttctatatatattctaaaagaattaaagctcttcaatggtgtgtaacataagatagcaacttttttttctcagatcgactaacagttttagaaagaaaatgttaaatcataaaatggattaattgagtgtagtacagtaaatcgttttttgtattatttcatgtcttacatagatgtattattgggtatgcgagaaaaaataagattggaagatatagctaggggctgaagaataaactatactatattataaggtaatttcttaatttggtccgaccacaaaatttgggttttgggttagtgtttccacttattatagaaagataattctagttatacaaattaggtttaaagatatccttggtattacgttgaaatttacgataacaaaataagcatttgatcatttggattcattgaaaatcaagtcaaaatgtacaccaacaaaaaaaaacgggaagagaatagcaaaaagaaaatgaaacaggagtaaatatatataattgcataaaaaaggaagaagaacgaaaaagaaaaagagcaaagatgttgtcctaaccaaaacggtgtccttaagagtattggaatgggatgtgtaaaagagtaaagatcattgatatgatatttcatatttatgaagacaatcttccactaaaatttgtatggtaaaataggatttgacaatttaaaggttacaaaagtagtacaattattggtctataaactaaagaacttcagtaataagcaatgaattattcttttgttatagctttatatgaaaatattagttaacgattacaacctataatcttaggtaaatctactaaaactaataaactattcttattttagtaagaagaaaatatcaacgctgcaaagaaaatgtcaaagacagagaagtctaaatctaaaacgttaattagtttctcaaatcacattttagtggaatatttgtctcaattattaacaaaagattccgtaaaccttgtagattcatcgtcaacttcttaaagtctttactttaggaaaaagtctcataaatacaaaatatccatcacaactttagatttatggctatcaactttatttaatttttcaagcaccacatgaagaaaatatacctatgagccgtatgatctaaatcttccaataaatgtcctaattcagtaataatacttcacaaataaataaaacaaacatggttatcttataaatcttcaagaatgtatctaacaagaatacgagatcgtacgtgtgttttatttgggtttttatttgttatcacaaacaataataaatgatgaatatcaaattgtggtatttattcgttagtatctttgaaaaaaactaaaacaaaagttatgatcctttagcttgtgtcggcttctaccaccttcgtggcaagatctcctcattcacgttaacgtcaatttttaatttcatttccacgtcaacatcaatttgtgaacaaataaggggatcatacattaggaaatttttgttacgaaatcatatttatcttaggattttttagaagcttctctctcttttttttttcttttacgccggataccgacgaggcgacgaccaccaaagatatatgaagatattaaaatgttggagaaggtttatggaattaacgaattttaaaaacattttaatcaacaaatccacaaagagtttaaaaggcgaagaattatatggtataattagtgaaggtactttggctttgcatgggaatatatggggattattctaaggcatgtgatgtgtaattcgattgacattctaacaactaagttttgaattcttcgccaaagtgttgtttccctaattacctttttttccatgtcttgacatttattgagagtgtgacatctcgatgatgccactgcacacataaattcgtaccatataacaaattttattatatagattaacatttttgtagattgaatttgtcaaggattaccacaatcaacgtggctaataactcgaacaaatataaaatatacgatatttgatcttagagtatgtatacctgattatatatatataagaaaagaaaacagaatagtgttttttgataagcaaaactgatattgttatgtatggataaagtgacatgtgcaatgtgttatgttgtcatggtagttataataaaagaataagaaattattgtttaaaaaaaattccaagtgtagatactatgagaaaaccccaaaatttttattaggtacatgaattagatataggtttaaaatctaatcactaaaactttttataacgactcccaaaattttggataagccatgcaattaaatttatcgaatagaattatctcatattggaaaaaaaatacgagtctgacgatcaaagatttagataagtcatgttataaaactttttttggttcttagacatcaagtattcacctctactcgtttttcttcttgtttaggcataaagagttcatcaaagttcactcaaattcacaacattcatgacaaaatacattgaataattttattctgatctttagcagctgttaagtatactaacacgttttacgaacttgtcattgttgtaccggactaagaaccaaaaaaaggagaaaccctacaaagaatgttcaatttatatgtgatgcccataagcagaagttgattaatagttagattctaaaacatctagcgacttaatagttaataattaacttaatgtagaacctatatgatgtttttaatttcctactagtttttatagatcgtacatatgaaatgggaccggtaatatgttaaccactcggtacttgtgaacggggaattatatttagttgaaacttgaaagcaaaattcatgcattaaatgatgttcaccaaactatacaaagccggtgccatgttttatgcattaaaagtaaaagttcctctaataaccataccaaaatcctagaggttataaagtaattcaccaaactccattaccactgagaacaataaaatgaactaaccaagtgagtcattaaccaacccaaactcaattttgtggttagcattagacaaaactataattaaaaaaatatataacaaaaaatatgtatatatttaaacatatttgaaattatgatttaattattttaagtgaaagtattttcgttttctttttttaaaacttacatttatattataaattttatcttattatttgaaaacttgtagatatattagaagttaaaagttttttttaattaaatacattaattagaagttagtttttttatagcctaaactcatttctgaaacctaattttaggggagtgtacattgttcatagccaagatttggcgtacggatactagacgtatacaaatcacgtttttaaaaacagagattatttcacctaatttctctaatccaaaatgtgaataataatgacactcttaaatctctaaaaatatatgtacactcaacgtataaacatataagtagtaaatcaatgtcaaataataagaaaatgaaaaaggtagagaaatcatgcataatttgattgattgatgcatcatctaatttatatgtggtttgacccgcatttggtgtcttggtcaccttctccgccatgacggcgcatctaatgttcctccaatcgattcttcttcctcctctgattctctcctctccaaaccaaaactctcacttttctttctgagattatctgacagtaaaaaatcatcctagattagaaactgtcagatcaatctcagtctttgtctctctctttttccacagtcctgtttttgtttctttcttcacacacagcttataattgatgatcatcaaaattcccaaaaacaaaaacttttttttttctttgtttgtttgggaaaagagtttcagcattttgatttgatgttataatatttcccagtgaaactatgacttgtccaaatcttggcactttctctctgtttttttcttcttcgtcttcgtcttcccaatttgtttggatgagatgagaatttttcgctataaaaaaaaacagagcatatcgaaaaatttatgagatctctctctctcactcaaaactctaaaaatctcaactttcttaaagatcataactttttatagatacccttcacctctcactcactcactccgatctctgatcttttcccgagaaaattcctcattttcccgagaaaactaaaaaaatttagataaccggaaaattgcaaacaacgaggtcggaaccgaccagtcacggtcttctctctgcttttctctgttcggttggtttcacggtactgtctttttttttttttttctcttttctttttctttttttccactttataaaaaacaatttttttttctttcttggtttcttcgttttaaattgttctcgcgggtatttaaaaaaagatttgtttttatataatttcaaggtttcttgaatatctgaagaatctgaaattgttttttttttgtttcagtaaaaaataaaactttgaggttcaatggtaggaggtggaacaaagagaagaagaaggagattacaactaagtaaactatatacactaacatgtgctcaagcatgttttaagcaagaccattctcaaatcggaggacctggtttctctcgtgttgtttattgtaatgaacctgattcacctgaagctgattctagaaactactctgataactacgttaggactactaagtatactcttgctacttttttacctaaatcactctttgagcagtttaggagagttgcaaatttctactttttggttactggggtcttggcttttactcctcttgctccttatactgcttctagtgctattgttcctcttctttttgttattggtgctactatggttaaagaaggtgttgaagattggcgccgccaaaaacaggtaacttttggttctgattgtgattagagatggattagattatgtgttgttagctaatgaggtgaataatagaagcttttgtgtatgtggtgtttaggataatgaggtgaataataggaaagttaaagtgcatagaggtgatggaagtttcgatgcgaaggagtggaagactttgagtattggagatatagtgaaggtagagaagaatgagtttttcccggcggatcttgttttgctatcttctagctatgaagatgctatttgctatgtagagacaatgaaccttgatggggagactaatctgaaagttaagcaaggacttgaagtaacttcgtctttgcgtgatgagtttaactttaaagggtttgaggcttttgtcaaatgcgaggatccaaatgctaatttgtattcgtttgttggaaccatggagcttaagggagctaaataccctctctcaccgcagcaacttcttctgagagactcaaaactcaggaacacagatttcatctttggagctgttatcttcacgggtcatgacacaaaggttattcagaattcaacagatcctccatctaagagaagcatgattgaaaagaagatggataagattatctacttaatgttcttcatggtgattactatggcatttattggttctgttatctttggagttacaacaagagatgatctcaaggatggtgtgatgaagagatggtacttgagaccagatagctccagtatcttctttgaccccaaaagagctcccgtggctgcgatctatcattttctaaccgcggttatgctgtacagttatttcattcctatatccttgtatgtctccatagagattgttaaagttcttcagagtatcttcatcaaccaggatattcacatgtactatgaagaagctgataagccagctcgtgcacgtacctctaacctgaatgaagagcttggacaagtggatacaattctctcagacaagacaggaacattgacatgtaactccatggagttcattaagtgttctgttgcagggacagcttatggtcgtggtgttacagaggtggagatggctatgggaagaagaaaaggtggtcctttggtgtttcagagcgatgagaatgatattgatatggaatatagtaaagaggcaattactgaagaatctacggtgaaaggattcaactttagagatgaaaggataatgaatggaaactgggtcactgaaactcatgctgatgttattcagaagtttttcagattacttgcggtatgtcatactgtgatacctgaagtggatgaagatacagagaagatctcttatgaagctgaatcgccagatgaagcagcatttgttattgcagcaagggagcttggttttgaattttttaacagaactcagactaccatatcggtaagagagctcgatcttgtgagcggcaaacgagttgaaaggtcagtcagttctatctcctctactttattttattatgctatcaaaagcttattggttttgtgtttcaggttgtacaaagttttgaacgttcttgagttcaacagcacgaggaaaagaatgtcagttatagtgcaggaagaagatggaaaactcttattactttgtaaaggagcagataagtaagtgacctttgactttagaaaaccatttcatatagattttgaacttatttgtttgatttgtttcgttttctagtgttatgtttgaaagactatccaagaatggtagagagtttgaagaggaaacacgggaccatgtaaacgagtatgctgatgcagggctgagaactttgatacttgcttatcgtgaacttgatgagaaagaatacaaagtattcaatgaaagaatcagtgaagccaagagttcggttagtgctgatcgagaatcgctgatagaggaagtcaccgagaaaattgaaaaagacttgattcttcttggagctactgctgttgaggataaactccaaaatggagtaagcaaacactgatgatagtcatataatcaatttatagttggtggattgaaatgtcttatcttctctctttatccttgattcctttcaggtccctgattgcattgacaagcttgctcaagcaggaataaagatttgggttttgactggtgacaagatggagactgctatcaatattgggtatcattttctgggtatcaccttaatattgtctactcttgagttcctgcatacagttttcttctacattctttccactctttgaaccctttgtgtgtttgtctttcacaggtttgcttgtagtttgctcagacaagacatgaagcagatcataatcaacttggagacccctgaaattcagtcactagagaaaaccggagaaaaagatgtcattgcaaaggtagaaaagataccaaagaattaatattttgtggagtagtattagcagaagattatattagatgaatgtatcaatgtggctagttgttatcttgcaggcatcaaaagaaaatgtcttgtcgcagataattaatggaaagactcagttaaagtattctggagggaatgcttttgctttaatcattgatggaaaatcacttgcttacgcgttggatgatgatataaagcacatctttctagagctggctgttagttgtgcgtctgtcatttgttgccgttcatcaccaaaacaaaaagctctggttagttttaaacttattcttgaatcttgagtatacttttgctgctgtcaagattttcacaataagtaaatcgctatgtaggtgacaagactagtaaaatctggaaacggtaaaacgactttagcaattggtgatggtgcaaatgatgttggaatgcttcaggaagcagatataggtgttggtattagcggtgtggaaggaatgcaggttcagtttagatttatttaactatcatttgttgattttcattgtgtgtttgtttttcttggtatgggcttaatcctgatcattgttcacaggctgtaatgtccagcgacattgcgattgctcagtttagatatttggaacgtttgttgctagtccatggacactggtgttacagacggatctcgacaatggtaaatttatttctacatcttcagactaagaccaaccttctgtggcatgagtcttgacataatcagttttctctatctgacagatttgctacttcttctacaagaacattacatttggtttcacactcttcttatatgaaacatacacaacattctcatcgacacctgcctacaacgactggtttctatctctttataatgtctttttctcgtcccttcctgttattgctcttggtgtcttcgaccaggatgtctctgcacgttattgtctaaaggtaaacattacaacagctttatcttctcaccagtcaaaaaatttgtgccaacttcttccttttttcttggttttgcagtttccgttgttataccaagaaggtgtgcagaatgttctgttcagctggcgcaggatacttggctggatgttcaacggattctacagtgcagtaatcattttcttcctctgcaaaagctctctccaatctcaagctttcaaccacgatggaaaaaccccgggaagagaaatcctaggcggaacaatgtacacatgcattgtatgggttgtgaatttgcagatggcattggctatcagttacttcactctaatccagcacattgtgatttggagctccattgtcgtttggtactttttcatcacggtgtacggagaacttccatcaagaatatcaaccggtgcatataaagtctttgttgaagctctcgcgccttcattatcttactggctcattactctctttgtagttgtagcgacgttgatgccatacttcatctactctgcacttcagatgagttttttcccaatgtaccatgggatgatacaatggctaaggtacgagggtcagtgtaatgaccctgagtactgtgatatagtaaggcaaagatcaataaggcctacaacagttgggttcactgccagattagaagctaaaaagagatcagtgaggatatctgagcctgcatcatgacaacgaaaactaaccaaacatcaacttgactcgcagaacgtaaatagcaccaagaatatatggaagctagaagcttacttgcttcagactggatcgataaaggctatccaaccagttgttgtacattctgattcttgcggccttgcccggttacgaaacaagatcttacagttatgtccagtaaattgtgtttacagaacagctgaagattataccttggagtctcagtagagagatttccaattgtcttttctcttcttttgctctttcaagattgccattagtcctttacttttttactgtcattctcaatcttagagaacatggagaatgcatagatagggaagttaaataccccttttggttcggtcctcttaacgctctaataagacatcttgtgtaatgagcaatgacaaggaacgatgatctttgtaattagctatttcgtattgtgagtttccgaaatcaaaatcgtttgctgcagagtctccttgtctccagaaactcccaaacacaaactctcctttcatggaaagttcctgcaacatctcctctacgtcttccatgcaactaacttcagacccatgctcctctctgcaatcatcgtcctttgtcggtaggacgatttccgtgtctcttctcttctttcgtccaagccttctagtcacaaacttcttcatcttctgagaaagtttacaaggaatcttaaagaaaataaagataaagacttgtaagataaaacactcgcagcagcaacagaagataacacaatctgctgcaaaagcaccacaatcttcttccattattactcaaagatgcattaaaaaaaaaaaactgttaaggtaacaacaaagatataaaggaaagagatagagaaaacagaagttaagaggtgacatcagattgtgtcaaaggaatatgttccttgccaatattggtatcaacaaatgcaacgcaaagcaacacccatgtgtttgtttttacacatattataggatcacatgggatttaagatgcttttagaagcattgttttaggaagcttggacgtcaaaacaactaacaatctttcgttttctttgattctactactctccaacatggtaactcacaatggtaaaaatcagtctttctgcaactaaaaaactgagccacatgaatacacaatgacacagtgagacaaattgatttttattgatttattatataagtaatgtcacataatgtgcaaacttgaacgtataagaatagaaaaaatagatacaaaagtaatttcatgtaagaaacgaagcctctcttgtacccatctatatccctttttctcatctttctgttcaaccactagctcctctgtaatcctctgtttctacatattgtattagtagtgtctttagtttaaaccataataaggaaacaaaacatgagcacaaatcaagagaaggcaaaaccagagggagattcttactgtttcaatcactctgagaaggctcagctttgatgtgctggttttagtcgcgaaagatggtgagtttttgagacacaactaggatatttcttaatggtttgtgccactaatggcgagagaagaaaaagaacaatctgtgtatgatatttacacgtttgcgtctctgctattgtaactactatgcgagaaaaaatctgtactgtaattttggctaccaaatgccattcttctaaacaatctgatctctgctgactgttgagctgagttaaagacctcgctttcgcctagtctcattccgttagtaaggtcttccgcagctaaactttcaaaagctctcacaatctgcaaaatatatttcaagattccttcaagttttaagtaaataaactcttatcaaggaaagaagaaaagaaaatgtttttacttgtcccatccgaggtctcttggtagctaaatgccgcacgcaggctcctgctgcttcaatcattctaaacatttcagattctacatagtttcctccaagcttaggatctgctaaagaatcaaattcctcggtttctatggcatgacttatcaaaggccgggcctgaaaaacaaataatgcaaaggtcaagaggatttcaagaaacaggtttacatgttaagaaatgttcaaatagtgagcgtacccattcaacaaggctctcatctcccagtggttgcgatgtatccaccggtttacgtccagtgattaactccagcagaacaaccccaaaggagaatacatctgatttctctgttaattttccacttgatgcatattcaggagccatatagctaaagtagatgaatgaaaaatatcaactagatgccaaaatatgcgactaactaatcaaacaaggcaagcacctacccaaatgttccgatgacccgtgtggtgatatgagtgttacaatcaagagctaatcttgcaaggccaaagtcagaaacctacaaaaaaaatgagagatcaaatactgttcaagtcaccatttaactgaaaccttgaaaaaaatctaaaatagcaagactaatgttgtacccgagcatcaaagttgtcctctaaaagaatgttagacgacttgatgtccctgtgaatgatacgcggatgacctgataatagacaagagtttagagactagcatttgattgaaaaggttaaactagtggttaagcaacaacttacaatcttcatgaagataagctagtccacgagctgccccagccgcaattttaacacgtgttgcccagtctagaacagatttttctcctgtttaagagacatgtagatagtgtcagtcccagtggtgtgtgtatatatataaaatgtaatcttggagatgctttttctttaccatgaaggtggaagtaaaggtcattgttagaaacataatcatagataagcaatctacggtcaccagagatacaatgtcccacgattgaaaccaaatggcggtgatgaattctgctaagagtttcaacttcggctttaaactccctgtcaccttgtcctccaccgatctttagttgtttcacagcaactactctcccatcaggtaatatccctttatatacacaaccaaatccaccttcacctaatagattttcttgtgaaaaaccatttgttgccttcacaagttcttcataggaaaacaatgctttcgaattgcctaagccaccggattgtgattgataactgcccgaacgcttgcttgctccaacaggtgcagatgactgcatcctaaaaaatgctgaatctgtacataagaatatcaaaatgtaatgagaatcaagaaacgcaaacacaagtaacaacttttacatagcctagtatacctgatcttgcggtagagctcattggtgatggtgtaacatcgccaccactaacagctgaaaggcgtttttctcgtttcctcaagcaccagacaaagataccaaaaagagtgaagaccacaagtgctactgctacactgataccaacaacagcaccagtaccaattccactattattagtagaatttggagcatcaagaggaggtctaagagtagggttgttttgagatggattgttagaacctgggacaagtatttcaggaggagaacgtggaggagaagagaatgttggtggtggagaatttggacttctcctgggaggttggggtttagtatcctctggtggtggaggaggagattgagagggacggtctgaaggcggtgaaggaggagaaggaggcggaggagattgagtaggacgttctgaaggtggcgaaggaggagattgagtaggacgctctgaaggtggtgaaggaggagaaggaggaggaggagattgagtgggacggtctgaaggcggaggaggaggagattgaattggacgcactgagggcggaggagaacgtactaagattggtggtgaaggcgatggccgaggaggaggaacagatgcaggaggtggaggagaagaaggtagtggtgggactaatgcaggtggtggagatgctgaaggaggaggtgaagggattactggttgtggtggcggcgaagttgaaggaggaggtgaagggatcactggttgtggtggcggagaagagctctcaggtggttttggcagtggaggaggaggagctccattagcaactggtggtggtgaggtagtcaccggaggaggaggaggaggagctctatttggtggaggtgctgacggaggtagcggcgatgttactggtggtggtgtagccggagaagtagcattattcagtggcggcggcggcgaagtcaccggtggagaatttgaaaccggaggttgaaccggtgttgttgccatctcaattccgatcaacaaatcaacttctcattcaaaaatttggaatctttcctccaagtaacgatcagagacgatgatcaatcaccaaatgaacaatcaaaaacacctaaaagtcccagactttgagtatgacagtatcctgaaagtaccaaactttaccaactaagaacactaaacgtgaagaagtagcaaactttcgaaatcacaacacagctaatttcaagacaaagcagagaagacgatgtaatagatcaaacccagatcggccgagcaaaaaaaacacaaattttgctttgcttccaccaaaattccagatcactgagattacccaatttgagtggatatgcaataacctcagatctgtaagatcataactgaaacatctccgttataaaacttcagcaattgaagaccagagagcaaaaacacaacaagtaagcagttaaactttgtcttgtcccttcttctctgaaacttcgaatctgtaataatgaatcagagtttccttccgagcttgaaaatttaattttctgagtttcgcagcgtcttctctactctctgagaaaatgcttcaatgctacgttaaatcaacggtcaaagaaattgaaacttttaattgtttgtttttaaggaaataaaattaatttgtttccataaccgaattaagtcaaattagctactttccaaatttcaccgtaagcctttacgcgcttttgtcataagcaaaggagtatttgttgtttaatgaaaattagctggattttgcattgagtttattaaaacaccgtgttgctttaattatgtcgaaaaatttaatgcacaaaacgtcgtttgatgatttgaatattgagaattaaatttaggtttggtttataaagaaagctcaaatggttttactatgtagttcatttttttttttttttactactatgtagttcatgtagtagtcgtatatgaaaataatttactgtacatgatttcaaagatggagttataagatgttgatgaaatcggctacattaatttttttctagcatgtcaataaattctgtatttattttattggcaagtagtttgttcaatagtaatggcggttaattttatacatattttaatattttctgcgaaatatatcaagttgactttttctatatttctcaagatgtggtttgacttgacctctagaaaaattagttttaaattcttcgttgttgtatataatttttccccaattttgataaatccaaaatattagtagctctttcattttgtagcacatgacaatccgaaggacaaaactatataataaaaagggagtacattaaatattgtgatgagagcacatatgtcatcatcggatgtctttacgctaatctttacgaaaacgaacactacaaatcaatttggaaaacagaaatgagattagccaagttagtgttgaaacggtcaaatattttggttagaaaaatgaggaataatatttcaggttggatagtgtgttagataatagaaaacacgtggttaaccaacaaataataaaaatttgaatagaaggatttgccacataattcaagtgggaatttcggagattcacccgatggttgagtcgtagtaatggtgttcactaaagaatatcgtttttctttaactctcttccaagtcttgtttatcctttgttttggctagtattttgagttttttgttttctttctcttttgtgtcttgtttaaaaactagtattcctatggatttcggtcccaaatatccatcataaatgcaaaaagtttcacaaagaaaaggaaaatgctacggcctacggtgaaagggagagacacttgaggagagtaacatgaaatacgtgtcgccgtcaataccttaaacccccaaaagaacattcactaatccgtgatcccaagacattccaactacttcttgtctatgccactttttttttggttttttatttacacactcacactcttatctcaccacgtgccattactccatcattacttgtgaacaagtcaaaaaattaaagaagagggaaaatatttaaatgttctttttacttggacatgtggtgtgagagctaagtaaggatcttgacgttaaaaacaaatataatttataatgaaagaacgcacttgttcgatccatcatcattgcacaagaggtgtaactcgcaaacaacctgccacctctaatgctgtctccacttagatgttaccagaatctgttgctatattgactctattttattatatattagcagtataataaatatatgatccttgcccatatcataaacatgtgttcatgtcgatgcatattacgcaaactaattttgctctccactctagttttcacattcaagacatggaaaaatcaagaacgagattgaaaaatgtaaaaaagatgatacattacaagatgactaaatgggttcataaggaaaaatccatagttcatgtgtcaaataggtttaaacccaaaaggcaaaaattatttatctgaaagacaatctgagaaaatattgagatcttgttgactgactgcaactcccagtttttcatttgctctctgcatcatatatatccgttctgtgatttatctataaggaacaatcaaaacaaaataacacattccatagagattatcaaaatattccacagagtagcaaatgaatgttcctactctccaaatccacatagtagtagactctacttatgtcaaatcgaagcttaacaacattaggaaacatcatcagctcaaactattcttaacaacaatcgctgaaatgttgaatatttgctctcactaccaacagtaatcttgaggttctctaagctaccaaactattacaatttactgcaaaaccatcatgagtaaatctctacaccgcacatgacttttatagaaatctaaactacctgaatcaacaactacaagcaaactttcttcaactcctcagtttggtatacatagatggtttatagtctcaattctagaaatgtaaattgtcaaaccacataaccatatatgacttccagtgattagatgatacaagtcaagattaactgccttaagtccatatgcttaactatgcctaacaaatcctcaacatgactgacgaaactagtcaggattcacttccttacacatacctttaactctatgcgcaatttcaacagcaaatacttcctagctctctgtacatactaacaatctacaatatcaaaacacaaatcttcactgcaaatcaaaataattcccctaaaacccaaacatgcatattccatatacaatacataaatgcaagtttcactaaatcacataagaaagcaccaaagcaatcataaagaggatacacaagatagaagccatgagcaaaagcaccgacgaggacaagaccgaagagacgatctcttagaactggcttatgccttaaagacaaccgaatcaaaggaagcgcaggtgcgtagatgagaggtactaagaatttgatcggagctcctttcttcttcctctccattactggttttgaaggatcgcttgacgacgccatgacggattcttcagagagagatcttttttttttcaaattgcgatttgcgattcaatttagggatttcatctttttcactccatttttttttgtcttggttttcaacacttttaaacatttttgggcctcgaagcccacgagaagttatatatagcccacgaaaagttatagatctatctagtaaattttgtccgttggaggagttataggtttatcaacccgaaaataaaaatctttttagctgtcaaacaaagattaaataaacgagtgcagtttatgtttgaatcaaagagagtgagccatgtattagggattccaatattagagattcgaatatcctgaaattgttgtattaacatgtgacccttcgctttgtcgtaaggccaagtgtccctttcttttttccaccaaacctaaaattttatgttttttaagttaaccatcaaaatggttggaaacaaataaatttatcatcttcaactacttaatgcattaattatttagattccgataagaaacatggtggaatggcagaattgagaacccaaaaaaaaaagcagaatggaatgataaatgattataatggaaatatgaatattttttactagttgtacaaaactattgtatatttaaaaagtgaacaagttattgaaattccttataaaattcaaatagttgtagaatccgtatcagttggagggaagtcacgatttattgatctccagcccctagtcacgatttatccagttttattcaaaacaaagaaacaaaattacgtaagaattcgtcttgcttgtatagacccaagattatcctccctacaaatcaagttaaaaaaaaaaaaaaaaaaaacccgaaagaccctagacacaatgcaaatgtcacaatttttatcgacctgaaattctataacatataaaatcaaaacataatacaaatttaatcgtccactttcctataatctaggaagacttattcaacaaggacttagtcaacaaggacttattataaaaatcagaacatgacctttttattctccatgaacccgattattaaactggttttgaattttctaaagaaattccggttcgagtcaattaccgtaagatatgtgaaggaaaaaaaaaaagatactataatctaaattggccgacaaaaaataaaaaatctaaattaatgatttgattatggttagtggttactattctattaagcaagattcagaggcggccacgttagatttattttaataaattgccatgcaaaaagatagatttggtattcaattctgtgaatggttagttggtcgattcatggacctttgttttaagcaagcgttaccataaataaatcacttctaattgtcacaccaaatatctacatcaccattcacgcacgttattctcaattcatcttagattctcttatctacctttgtattttactatttacgaaggtgatgaattataacctttgccatcagattcatcacgaagatctgtctaaattagacaccaaaaacaagaagatattttagtaaatatccaaagttagaaaaacaaagagtcttcacttatctcgtgtatatactacatagtagcattcgtctactttattcaaaatttccaaccgaggaaataacatttcttggttacaaacaaaaacggacgaaaatatttcttacattcacataaacattttcaaacctacaccaaaatcaacatcaggagatgattatagtatgactatcagattatgacacaggagtagaagtatttgtatttgtagaggaagatgccgccggcgagttgcaacttctctccaacgaacgttttggagattgcgccaccgcaaccggagcatatacaccacccttgttggctacatcggacggtggtggaaaatcttgtgacgatggtacccatatgcctccaaccaccacaaattgtggttgttgctgattcccggtactttgtgccgccacggatgttgctgctggccttcttgtgtgaagtctatatttctgaaatattacacaaaaaatggttaagaacttgagtaacatttcatttaattaccaatttcacgaacttgtgattataacataagaatcattaatcactaacctgtaaatggcttttaacttcgtcgtttgttaatccatcaaccttcatgtgatccctgatttgctttggtgtagcaactgcaagattggcaaataaaatgtcaaataaaaatcattttttaatgttgataataatctttgttacttactaatataatgtaaatgttgagacgttttaatgtttaaaaacagttctttatcaacccgattatgaatcactaatgaaccaatcagatagaagataatcaggtaattaaaattaatcgtaattaccatgagatcctccaagctgctgaagcgcgtttaggaatcgacggtgtaattccggcgaccagcaccgcctttgttttctatgcgtatgcgactgcgattgctgctgctctatccgtctttcctcatctccagctttaatcaaatcacttttaccaccacaagtttccgtcgtagaactcgtcgtcgtcgctggcatcgaactagctactttcaccgccggttgcaaatcagtctccaaaacgcgcttttgaaacggctgaaacgcaccgctttttggtttcacctccaccactttcgctttcttagctacacgctcctataattcaattaacacatgattatttcctcataatcgaaaactaaaactcctttaaaaagctcaaaactttaaatacctcttttggatttagatccggtgaatgattccatagctgaacagatctaagccaatctgatttcttattattcacaagttctggagaagattcatgttcaccatcttcttcttcttcttcttgtacttcttcacacaaggaactaattttcttgataggaataaactcttcaaagacaggaccaccacaaacacttgtggtctgttctgaacactgttctgatgtagttgtcgtcgtaccagataactccttccgacaagcttcgatcgctatacagaaacaaaacataacaaaaccccatcaagatttgtaagagacttgtttaaaaattggagattttgattggattattattaccttgagtgacaagctctaaacataaaggaagctcgcgttgaaagacttggattttcttctgttcttcttcaagtgcttcaacgtattcatgacatttctgcattttcttagcgtaatccatctccaccatcattattattcaaaagggactaagaaccaagatctatagagagacgacagcgagaaagaagcttaatctcaatggagaaagaatattggatctttaaaatagaatcaaaacatagagaaattgattccaatgttttgttgatttttcaagagatagagagagagagagagagagagagggtttaggtttttggaacaagaaagaagtggaagagaatcgaggtcgggccgtcgcgtacctaaaacgaatctttgagagttaaaatgtttttttctcttttggaagagaagggtaaaatagtaatatcgtgaagatgatgggtgaatattcggaggatcagattcgattataggttcgcatctctttgtatgggctggaactgacgtcactattccaatctctttagcttttttttttcagataagaacgaaaactcaaccatttttcttctcccctaattaagattccagagttttgttttccaacgattgttttatccttcatttaacttaactatcatctaatagaaatgattttctgtgtttctatatgggcaaatctattcattaaatggagattttatgatttagaatttcaaatttaaagatttggtttttattatgcgtcttttccaaaaatcataaaaattgacgttcacctaacaaatatgcgtttcattaaataaattaaaatactactactatctcataaggaaaaattatgtttaaaactttcaatgacaataaatcatatcattagtgatatcttaattccaactccaaacgttaatcattcacaatttatgtaacctaccactcgactacgtttttacagatatttagaacgaatattaaaatttgaattggaaatgagctaatttggtgaaggaatattctaggggaggaaaaaaaaaaaaaaaaatagaaagaagaatcttttggaaggaagtgtgagaatcacatttgcccacgccgcgtattaattatttacatatccgacctttcatattcctcaagagccaatttgctaaatgttcacgcgcatagagcgcgtacccacgtgaccaaatattcaattgatgcaaccagattctctgcttttgtcatattcatttatcttattggtttcgtcgttatctttttaagaaaaacaaacggttctttggtggttcgattccttgataggatgagttaatgcatatgaatatgataatagtatttttgtgttttttagatacagcaagattttggactaatttcattcacaataatcaccattaggatcatcaaaattttattttatgggtctacttatgtatgattgatgaaactatttgaaggtcgattgaaatgatcaactgttttcttgtagatggaaagttacaacatgcttattgctttaatcatcatcataataggcaaatatcagattcattccacatgttcttaatcaaatctgttttaagaaaaaacatctaaatctacacatagaactttgttgtctcaatctgatggagctaatacatgtttggtctttatgtgggaggtgtgggacatatagatttaaacgagattggctccatcaattcttacctttattattagcacatgataaaatttgtttccatgggaaaagaaaacaaacaatgtctaagttgtagtattatgaatgtttgaagatgcaagtaagatctccaagactccaacacatgtattggagttctcttcataatagctattgcatagccacaattaaacaacaaagttaagagtgtcaattagagctaaaaagagacggttaatcagttaatgcaataattgtcaattggcaatgcacaaaaataaaacatatgactctgagtccaagggaaactaccaagaacatggaagttaagagttttttcaatgggagtttctaaacaaaattcttgatatataataaaaatattatattgtttaaatattagtttggtttcttaaatttgaagaaacttagtccaattgtttcttaactaagagtcaattgaactaagtttcttcaaatgtaagaacctcatcattaaaatatattatttatctatatttacacttgattctattttaaaaactcactagattttaacccgcggtacaccgcagaaataatttattttttaaagttagtatacataaaagtttgcaaattgtatctatctataaaatatttttattttatagtttacaattgttattaaataacatcctgccaaacccgtcccgtcaacccgtcccgtaaaaaaactatttattttattaatgttgatcttatttatgatatgtttatgaattattgtctaaatattttgtaattttgtggtaattaaatgctatcaaatatctctgcggtttgatgattataattgaattgttatagtcatgccgaaaagcaaaaatatcaaaaatgataattttgtagtaattaaatgatattaaatattttggaagttttattttagtaattaattgtgtagttaaggtagaaagattttgggaagattattaaatgtcaaatatttaattagaagattttctttctaattatcaaaaacaattattaaatatcagtggcagcaaatgtaaataaatctcaactccaagatttatttcacaaagtggctggatttaagaaacttccgttgaaaatggtttaagaaaataggctccggtttctattccagttaccaacctaaccttagcctctctaaaacatcgtcactgaagctagattgtgcaggataccgagacaacgaacatttacaaattacaatagaaagaagtaaagaacatttacatttttatatatagaaatgacaaaaccaactaaaaataaaaaaaaaagtataaaccgtagatcatacatacacacattgaaccggttctaaccaagactaacaaattatagcttaacaagacttacggacggttcaagtgttaaacaaccctaaaacggtaggtccaccttcaacgtatcggtcccagaggccagagcaactaaaccagaaatagattatttatttataggttcgaattttggttcggtaaaccgggacaatcagacaaaaaggtttaagcctttaaggctaaaacgtagcgttttgaatcggaggcaacgtaaaattccgtaaaccaccaatttctgaatttttcaaccttattcttatgattaaaattgttcggtcctgattatctctgtgtttttgggaactgagaagcatccactcgacaatggagactgcgatttgtgggagattagctctcgcaccatcctctctcttcaattctaaatcaggttttcttattctctctctgattccgtatcaaacatctctttgttctgttcggtgtctttgaatcaaaaagttcgaaacttgaattagtaatcaaattccggagctttctgtatataatcagctcatgacagttgatttacatacatattttctttgttgatattgatttgtgagatgattaggtgcagaaagaaataggctttttagctttttaccttgtctgaaactgaaactcttctgtctgaagcaaagtgaattgaataaacaaaaacagaacagaactatagggtttttgatgtttgatacctatttcttacatacagataattttagtgaagtttgataaagataagttttatgaaaggcatggtgatgtttagctctttctaaaaagattatctttgtggcttgtctagttgtgatttggtttgctcttctctctaacttggtgtgtgcaggggacaaacatttagtctcaaaaggaccatgtgtgaatcgtagcattctcatgaccttgtctacatctgctgcattgggtaaaggaggtggtgtcttagacaaaccaattatagagaaaaccactcctggtcgtgaatccgagtttgatttaaggtattattgcctacaacaatctgaattttcctttcaatatgatcaaattcatatgcttatttgtgattatactttgctttgattcaggaaatcaaagaagatagctccaccttacagggtgatactacacaatgacaacttcaacaagagggaatatgtggttcaggtgttgatgaaggtaatacccggcatgactgtagacaacgcggttaacattatgcaagaagctcatatcaacggtttggcagttgtgattgtttgtgctcaggctgatgcagagcaacactgtatgcagctgcgcggtaacggccttctcagttctgttgaacctgatggtggaggctgctgaaactaattaaactcagtatagattttcccaccttccaggactctctatttagtcaaaaacatttgttgttttaatgtatataatatcagaaatttggtacaagactgttactatatgcaatgaaccttgcccctacatagatctgttgtgagttttaagtgttttcatttggaacttcagaatgcaaataaacaaaactttattgaagtcaaatggtgttacagatgaatctttctgattctgtaatcactaatgtaaatgtatctaagcaattgtaagggagtgacgtgtttcggtttcatctcgcccaaaaaagcattcaaacccaagaaacctgcagtttcaagacattgatgggataccatatagatgtatcaagcatcaaccggagtaagaagcgactgaatgccgaagataatgaaaagcattccaccggaaagagccacctgcaacaacataagagctatttgatcaaaactcttactcacccccgtagaacgttgcttcaataaagagagggcatatcaaaaaaaacattacaattcgttcggatatttgagatgctaagctcttgccaccaagcacagcagctgtggtacacaatgtttgtgccctgtgcaaacagagagattagtcagcagtagagaaaggggtatcagtttgatacaaatcattatgtgaagaacacttacacaattccgccaaggaccacgccgagtggattttcatctgcagccaaaccaatggtcgcaagctagaagaaatagagtaattatcagtgagtatgtgaagcactagctaaccggaaccaagaaacatagtgcagaaggaaaagttacctgactcttgtcaccccattcaccaaagaagttaatcgaaaacgcctgcagaagagaggggaaatgtgaaacaagttgcaaacagttcacttctctaaagagaaattctgcagagtaccttgagaaaaatgggagagaagaatgcagtaaggaatggtcttttctgctttttctgttcatcttcaatctacaacatcagaaatatattataaaaaccttcgagtacactcaagcagtcttcaatcttttaagatctagttccataccttactgtttttcgattgatcattagtcttcttcaaatcagaatcctacaacattgaataagtgtcaacaccaaaagcattgctctaaacatgataaaaaagatttacaagaagagaaagtaccaaccagttctgcttcaacttctgccaattcttcagaacctctgcatatatatataacagattggatgagaaaatgctacctgaaattatttggaaataactagtgttccacaaagtcatctaaaatctcttaccctccttctttaaaaccatcccacaaagaccataacccaaagccaaagaacaagaatgttgttatatgatgagtccatttccgagagatctgtaagtgtggtttaaatcatcatcttagttgcaagttcatagagatttcatacactacacgtacaagcattttataattgtcataccagatttggagcagcccaaccaagtgtagcagataatatagtcatgacctaaaagtataagcaagacataaacctttacaaatcttgaagagttcagtgaactacactacacagttccattaagacattaaacaaaaacttacaatcaaagctgataaacaaccagctaatacaagcctcctaggataccgcatcgccaaaatctagttacagagtaacaatttagcatattagcaccaagaaaacatataccgaagctgaggagataaatagttagctcaacaataagaagctttagtaacaaaaagtcaacagagttggatcaaagaacataaccatttcagcattaactagaaacattggctccaaaattaacaaagaaacgttcatattgaattatgaatgttgctaaagctttaagctttgaggattttagaatattgatctcgccattaaaagtatactctttttaactccaaatatgaagaggaagaagatgattaagattcacttacagcagcagcgaagaacgttttgtcaccaatctcggagaggaaagtcatggcgagtgatttagtaaaaccctaaagaaacccatcaattagcttcggttccaaaagttacaaacttcgaattttcagagaacagattaaacttccaactggatcatacgtacctgcaaaagtgaccccatggcttccgagttcacggcggagcgatctgtttccggcgagagtcgcgtaagagaaggtgaatgttttttcttttgttgattcttgggatttgtttggtgggagtgtggagagcatatggaaaaatagattctcattggttagatcttgccacgtggaagaatatgattcgaagattttgttatgtaggacccagggaaccaagctttgacagttgacttgagtcatagagagtgttgtgttcatttattattgttccattgttgctctattaccaactttaggagacaagaagaattctataccacacaattcgtatttttgagagttgagacatcacatttcttcaaagacaaaggtacaaaggaaccaacatgagttatgttatggttttgttacacaaagcaggacaacaaagaatttatgattaacaatggccacatagaagaggattacctaagtagcttcgagtattgaaagtgttaaactgttttggccaaacaaacacatatgaaaaaaaaaagtacctcaaagttacatgaaacagtttatatcgagctttcttctagactcatagttaaacagttattaaccagtgagaactacatgatcttgtttatttcatatagtaaactttcgtacaagtatatctaattatctgacagagttataaaaagtaagatctacagaaatgttgttgggaatagtcccggtaagaccttttgcacctactgaatccaaagctctaagaccaagtaaattttgtgttggcttataagtaatggctaatagtctctatgctcgcacagctaaatgattaaaactgtgtaacaacaacaacaacattgctttctttattcctccacatgtcaaatcatcatcaataggaagttgtagaagatttgttttggtcaaatgtaacaatctaatgtactgtatctaattatcttcggaaaagagaaacactcaagactctaaacctttttatttatgaaagaaaaaaaatggtacatatgatgcagagaaatgttctaaagattatttacttctcccaaatgtttcaaaaagaaatgagaagagaagaaagagacaagatcggattctgacgagtaaaaaacaagaaaatacccacaagactaaacagagcctagacgtcattgactctgccaaatgtactactactctcttgtccaaaaccaatttcattattggtacgtttccggtttggtgtaaaataggtatccaattctcggttatgtgtaaatatttggtaaaagaaaagtcaatgaagcctccgggagaaacgagagtttactggttttagaataggagacagtaataaattttcatttaaaaaaagttactaaaaaaactaatgctcataatagtttctacatttataatgaggaagatgtttctttcaagcaaagcttttctttttaatgctcttcttcatcggtccactgaatatcaagttaataatactgcaaaaattatttggtttttatcattaaatagggatactattagaattcatttatttgtgtatgattttataaatcaaaattaaaaatattggcagattttttaattagctttccatcaacatcacatcagcttcagagcagaaaccagccagccagactattgcctgctttatggtaactagatttcattaatatctgtttttttttttaaacttcaaattagttatatagttaaatacataaaaataatcattgagaaaataacatcttaggctaggcttttgacatttttacaggagagatgagagatgagacattgaagaaactttcaacaatacatcatgattcatgagcatatccagttatcaactaaatcgtgcattaattacgtttttataatatttgaaaattgattagagaaattcattagctttgttatttatattaaataattatatatttttttatatcttttgtgcatgggaaaaaataaaaactcagagtggcagtggtcgagaggccattttcaactttggcagacacagtaaaacaagatggaaatgacactctctgtatctgaattatccaggctctgcattacatatacatacaaattttacacatttattccatgcgtgaaggtttataattatatgaaaacaaaatagttaaagaataacaatttcaaaaacagttaaaagcaaatcataagcctaatatcttggcaaattaaaattttatttttcttcaaaccctaaattttgacttgcacaagaaaaaagaaggcttattatagaaactttaaaattaaattaaataataaatcaaatattagagaaagaaagatatgaacatactcccaagtttcaagagacacattgtcagcaaacatccaaattatcgtcattctcgattctatcttcatatcttggttaaagaccatataataattccaaatactaatgtgtcgtataacaccattatgtctcaatttaaaaactaaaccacatcttattataattcggtaacacacatgacacatatggttgatttaaaattagcatgaactcattcatattcaattttgttttgctatcttcgtattgaacgtatattgaggagtgatattttagctgctaatctagctataatacatgaaccattgtgttagaatagtttacaaaaaatgtcacaaaatatttgacatctcatataattcataagccatatgtcctaacatacaatatatacaatgtgacatgggaaagaaattgcgagatcaaacttagaaactagctttattaggcttttgataatacgtaagataattaaaagactcaataatcactaatcctaaccttttattaaaaaaaatttgtcaactaaaactaaacttacacatttttcctatacttagacactttgttgattttttcaccaaggtaagatccaaccttacatacatttaatattttgatcgtttaagatttttaaagttcttgaaaatggagtattacaatagattcattagcaaaacattattagttttattttttcctcattcattagcaaaacaaagttaactgatcattataatcccacaaaattaactacactagatgtagtaaaaatctggaaaaattagtaaatagagtaacatatttttaaaataggaaaacaaagggtacgtgggtgtgtgtgttggttattgggaaactaaaatcccaccctctcagacgcaatacatttacactttttttttattaaacataaatctcaaaatctcttctctgatttctttctctctctcacacacaatatagtaatttcgtatttattaatgatgaatcctccagccgtactgattcgccatcttttcacctctttaatgaattctctcctcactccctccttcccttttaacttcactttcttcttctgataacccaactccttaagaaagctcacttctttttcccctgattccctttgtgtcatcatctttcatcatcttcttcttctaagaatcaacaacaatgcagagcagcttcaaaaccgttcctttcactcctgatttctactctcagtcttcttacttcttcaggtaacaacacttctccttctctctttttctcttcttaaaaagcttcaacaacaaaaaaaaaaaccaatcttttttgttcttaatggaaaaacagaggagatagttgtcttgaggagtttcatcaaccagtcaatggttttcaccatgaagaagctatcgatttaagtccaagttagcttctttttctcttccttttttcttacaagtgcaaaaaggtttaagctttgttgaaagaatctcaagtaggttccattttctgatttcctgcagatgtcactattgcttcagctaacttacactacacgacgtttgatacggtaaaaagttcaccaaacccaaatttttaaaatagaaaaaagtttccgtttttttagctcagactttctatgtatgtatgtatactctgttttttaggttatggattgtggtggtggtggtggtggtggcttgagggagagacttgaaggaggagaagaggagtgtttggacacagggcaactagtgtaccagaaagggacaagattagtaggaggaggagtaggagaagtgaacagcagttggtgtgattcggtttcagctatggctgataacagtcaacatactgacacttccacagatattgatactgatgacaagactcaggttttgttcctttgtcttcttcaataaccaatctctctgtctgtcacaaccaaaaaaaaagataaaaagattctgtcttttttttctttcatttctgttttgtttcttctacacttgttggagttttgttttgtcccttttgtttttttttataatttctcattgatatgtcaccttggtattcgatcaatattgtttgctcagattatgtctgtttcaataagagcttgtctgttttgttttttggtttaatgggacacaacatggatgattggtttgttgaatttactactaaaatttacaagtttcttcctttttatggttatgaacttatgatatgaaaaacgttacttggccgtgttgatgttgcttgtaaagtttgttgtttcattatttatagttgcattgatgtatattgattggtttgtgttatatagttgaatggaggtcatcaagggatgctattggctacaaattgttcagatcaatccaatgtgaaatctagtgatcaaagggtagatcttctgattttaaccatttgagttttggatacgttggtttatgtgtgaatgaacttttgacatttttgaattcttggcagacacttcgtcgacttgctcagaaccgggaggctgctaggaaaagtcggttgaggaaaaaggtatagtagctgattcaactgtgtttttcatcgtccattatctttgtatttacattgtcttttaataggcatatgttcagcaacttgagaatagtcgaatcaggcttgcacagctagaggaagagctcaaaagagctcgccaacaggtctgattaacactgttgtcttctttaatttgcatgttctactaaattgtattaaagggcttcttttgtatgcagggatctttggttgaaagaggagtttcagcggatcacacgcatttggcagccggaaatggtaaagactttcagaatctcacataacacttcttgactctttgtgatcttttactaagaatgaagttggttttgatgttgtaggtgtcttttcatttgaattggaatatacacgttggaaggaagaacatcaaagaatgatcaacgacttaagatcgggtgtgaattcgcagttaggtgacaacgatctacgcgttctagtggatgctgtgatgagtcactatgatgaaatattcaggctaaagggaattggtactaaagttgacgtctttcatatgctctcaggcatgtggaagacacctgccgagagatttttcatgtggttaggtggatttagatcatcagagttacttaaggtaaaagaaagggttcaaaacattttcacaatcattggttttgatttttttttctcataattggtaactatgttgttagatattggggaaccatgtggatccattgacggaccagcagttgataggcatttgcaaccttcagcaatcgtctcaacaagcagaggatgcattgtcacaaggcatggaagctctacaacaatcacttctcgagacgctttcttctgcttcaatgggtccaaactcttcagcaaatgttgcagattatatgggtcatatggctatggctatgggcaaacttggcactcttgaaaacttccttcgccaggtaagaaaaaatgaacagaatgtctcttgtcaacaacaacatttgttattacaaatcaaagagcttaaaggttactatatctttgcaggctgatttattgaggcaacaaactctgcaacagcttcacagaattctcaccacacgacaagctgctcgcgcctttttggtcatccacgattatatttctcggcttagagcacttagctctctatggttagccagacctagagactaaataaaaagcctgcatgagtcatgatgaccaaaggaaaagcatagttctggtcttaggttttcatatttacatatttttaactaaaagacccataacgctcttctctttagtgtattagatcatctgtttatttagttggtagtgaacgttaccattcagaatcagtcatcgtttttttttattttactttccctagctaaactgagaaacacctgaagcttacaagatctacagaaaagttttaaaccgtaagagataatagccgcattgcgtgaaagtatcatcgaatcatgccaggtacaactatgggaggtgttactttctcacggctccatttctctacattcgaaagccatcctgaaaaatcacaaaaaaaaaaaaaaaacatattgtgtaagctgaatctttatgttttcatgttgttacatcaagtttgccggggaaaaaaatctttaaagcattagatgaataccgatagaaggatcagcgccgcggttcttgagttctcgggactcttggcagatagcgcatggggtgcaaaagagatggactaaaaagtcacggcatggttcttcaggcaatgcgaaatgttccctaagcctagaccggtttggaaaagcgtagagccagctacaaccaataaagcctaacgctagatgaatcaaacctgcgttcatacaagctgcatttcccccaaaatccaaatgtttagatttcttactacaaaaacaaatcaatttcattacaaaaatggtatttatcggatttgtttctcttacgtatggttcctctgtttacgatctcgacgttttgagcgaaggaaacacatggcattatagctgtctgaacaccttaatggatccaataaacaaaaaaaaaaaaaaaccatttggttttgagacaacaaacaagaagaaagatcaaacaaaaaacacgaagagatacgttttggtacgtacaaatgtgagcatcttcgtgacaatcgcaaagccctgtggtccatagtccctgaggaagctgttccgcgtatggttgatcccggaacgacgtcccctccgccttaaacaccggcccattcccgtacatttacagttttattaataacaatttatataaccaaaatcaaacaataaataataaacaattcactctttgattttctcaacgttatttgttagaaattattgtagcagaagaaagattaatgtttctacagaattaagaatctggtgagagaaatatggaagaaaaaaatattttgaaatatatactttttttgggttggagctggacatacgacaccaaaaaaaccttgagcacaaaattagagaagataagcgtcaaattttgttggtgaaaaaacacataaagatgaagatctgatattaaatggttaataatgatttatctaaatgtagtagtggtactttatagtgtaattatatgaaactagctgttgttaatatacaaaaatagaaaaccgtttgttggatagatagtttgaccatattatacccccaaattttttttatctacattatataaattgtagatgtatttagttgaccagacagaagttaaatcatgggattttgacaagacagaagttgaatctcttaagatttgtcatttgtggaatatcaattattacgcttctacaaggttgtagaaaaagtatttacttctagaaaaaattagaaaaaaaaaacttagaattggggggaagtagaaataggatttgatcagtggtgagacattattgtccaggatagtggtttaaccccaaacacatgttgtgtaaattgagaaatgaaagagaaccttcactagaccaagcctattgatggctttcgagaaattatggtttagtgcattcgataatcaaaattcctaacccataacacctagttaatctttaaccataaatcctaaacaaaaaatggtgttatatatgcatttgtccacaacatgttttcaacatttccattatttccaagagaaaaaatggcagaaaaaaaatggtcaatgttagtgtcttacattgataatgctggttttccaaaagtcacgaatgtataataatgctgatttgtataataataaaaaatggagaaagaacaagaaagtgaggttgccttcaaaacgaaccacaagaactaggcttttgtctacaatttgtccgccactagaattgtctgattcattctaagatattattttagttgatagtagtaacattcttacaacttcaatctcaaatctcaacctttcaacaaaaaaactttgatctcaaatcttaataatattattttttgcttgaacctaaaaatagttgtccagattcatcaatccaagccatgcacctatatgggatatggcccatatccaacaacatgcacgctctataaaaaaaggttaattatttatgtgttgaaggtctattaaaagttaatcaaaccaattcgaattttataatttatactaaaagataactttttgtaaacgaattatttattgatctgatgatgattttttaaatgactagatgatctataaccgataagcatatgaattcctaaaacttacatcttgtaggaatccctaaagagtatagtaactatattatatacaacacaaaaacctttttggtacttaagatacaaacatatactatgagctacaatgaaaaataatatatactaatacagaactaatttaagggatcgtagtggtggataaaagcgtcgatctggcacaacatctccagagttgtggtgtgagcaagctgagactttccgagaatatgaaacgcgtgaccaacgcctttgtgcaacacgcgcttgatcacgtcctcattaccatcgcacatctccatgttgctgtccatgagcagatccatctcggccacgcacaccagcgtccttgtcaccgtcgacgacttgatgatcatcttcacaggtttacaataaggatgctctctgtttgcaccacgtggcaaagacatcctccaccatgcgtcggacgacgccagtgtcagcaccgctgttttgtcgttccccacgcgcctctcactctccgtacgctcctctccgctgtagaaaggttggatcaggatggttccttctatcttcagtgctagatcttcgggggatgctaatcttgccgcgacttgctgcgcgatgttgcctccagcgctatctcctgccaagaatattctgccaaagtcacattgcttggcccacaagttatcgtttcttgctttgttgagccaaagaatggcattgaccccatcttcgtaagctgctggaagagggttctctggggctagacggtaatttacagacataaccaagcaccgcgagcgagcggacaatctagccaagaactcgtggtaacacaaccaagaagccgagccgacgcagaatcctccaccgtggaagtaaacaatcaaagggagcttagagaccgacgacttggtcgtggtcatcgggacatagagacgtgcccatacgttggtcaacttgtctataacaacatcggagcaagtcacgccgagctcgaggggtagtgagggatcaacacatggcaagagctgggatcgttccacgtggccatctttgtaaactttaataaggccttctacttcgtctacgactggtccatgaatgttggagttattagggttagtggtggtcacatgggtcaattttgtgcctcccatattttctaaattttatgtgtgaatttgtgtatagtttcgtgatccacaaagagagctttttttaagagtttaggagactgatgtgtttggagatttcttatataggaggatgtataatggagggtgatagagactggtaaggtcgaaaatgttcccaaccatactttttcatcaaaatactatcaataattgaaattaaactaaatttgtgggctactgagattaatgtctaggaccgtagatgcccacgtgattttcttcaattcaacaatttgacgattcgaggtattcaagttccagaagatctagacatctagtcacaactatagaaaattcaatgatctctattttttttcttgtatctaactctctaaactttaagtttagaatatattgtcgtcacgtcactgctgatataatagaaacgtgtgaataagactttaaaagggttgttcttatccaatgagcgtgggaggcaaaattcaacgtgactatttcgttgtgagctagtcgatggactgtagtgatattattaattctcttgaactttccattcaccaaatcgtattatagtaatatatattggaaagctgaaagtggcacgtggacatcaaatattgtggtggtgggtgatagtctccaacttttcaacggcatagagtcagacgaagtatgggattggttgtgaaaggttttgtcaaaatgcactaatcaaaaagatgcattgcccactattgtttttcattgttcatgcaccaatctctttttatttataacgtaaggaaacatttcaacatgtttgtgtgtattagctagactattagtaatagttttagtagttgaatgtacatcattaatatatattagtgaccttcattacgtggttgttctttaacaaggctttgatgttaatgcgagatttttgtgtaacgaaaatcatatgggaatatggtaatgttgtaaagagcttagaagcaaaatttggtaaaatagtaataaatgcatgcaagagaaattaattgtcatttggtaaagttataatgaaaagttgattgaagtatgggtagtgaaagttgattggtgatttctgtgttaagccaatcaaagagtgggcaagtaggagggagcttaggtgggatatataatgtattataagaggatgatagtgttgaaaaagtgagacaaagcccattttcatgtttggtgagtttgattttgtggcacataggtgtataaagtttcaaacacaattatcacatagactttacttctggtctgcttcatttagcacactacacaatttgtcatagcaaagttctaaactcttctaattggtaacatagcggaatggttgagattacaacattcggttttaccattctacatggttgcaatcatttctttttaaaaaaaaaaaattattttgtgagaagttgctctttctttttttgtgctgtgatgagatcattcttcacacacttcaaaaacataaaatttgttggtctttttcgcttgtttccatacataagtaatgttccccaaaaatagagtagatgaattattgttaaggttaatctctttttttttcttttttctttttgtgttaaggttaatctcaaatactgtatttgaatgaatatacttaaattagaattttaaagaaattaaagaataattcccatatggctccttttgtcctttaactttgagagattctgaaagaaaaaaaaaaaagaataatgagaaagctacaccacatttgacacacacgaagagaatattaataattaatccgaaatattcaatacaccagatgagtgacaaatgtaaaggaatacaaattacatcacgtacgatatcaaaacaactaaaatagatatgcatagtttatcgagatatatgtaactcattgttaaaccaatctagacatgggtgcttgaagtggaggagccgaaggtgtagaggcagcaagtcgtgcatgtcgttccatattcccatgccacccgatgaccaagtccaaatcgcggttgtgttgaagttgcctatactcttgacaaagagcgcatggctcgcaacaaaagtggacacaacagtcacaacaaggtctctccttgagattgtattgggctctaagtttggttcggtaaaagcaagagtagagactgcttcctccatacccggtcaacatgaatatgatcatgtacatcgctccgctcacaccacacgatgtggaacctctgtctacaacctccgcgatgcgtccaaaggcaacacaagggcaccaacaagtcaagcagcatgagtttatgtccatccaacattcacacaaatcagtcgaccaatccttggccttgatacggccttggcttggttggtcgttagaggaaaggttcatggtgtgatctgtttgaacttttaagaaacgatgtttattttcttgtgattctgtttttgattacatatttataattattgtagtgttatggtaccttttcatgaattaaccgtcagaaactgcaaggaagcacgtagggacgcctcgtttagttttgcttttgttcttttactgcctttttgttattttaaacacaaatttgcataagatacaaaccgaatcatttatttactgcaaataggcattagtgtttgtagtatttgaagtggcttctttttttttcgttttttttcttttgatttttgattagtggtgtagatttttagttttttgaaaaacttgaatggtaatttagtagtatagattgtactttattggttagaaacaaaaacaaaaaaaaacattggaaatgcttttgctaaaaactcatagaattggtaaaataaattgaaaatctagattccctaatatttgtctatgctttatgtgcaaggcctctgtttgtaacaatcggtttttatacaaaattcagatgacaaaaaaaaaaagattccctaatatttggaattttgttttataaaaaactataaacctaattatgaaaaaatacttttatcagcaagtaaaaactgattaaagacgttcctctaaacatgtgattcagagatatttatacgtaactttttttgctttcacaatcaaaatgatttaaacaaatatacataaaacaaaagaataatgtaacttacgtttgttttagtaaatttgcttacaaattacttattacaccatgttcataatatttaacgttgtatcacttccgaatcacttctttcacacacattcaaaccttaggaatctgatcaacagcatctttgaaaccagcttttgtgctaagctcctcaaaagcattgacaatgttttgcagccttgcaacaaactcaatcagaagggaagcgaacgtagccagagacaacgaactcgcactttcgtatactttacattctatctcattcaccacagtaccatcaatgaaggacatacttggccacatctctcggttctttaacatcatactctctgttgacatccaatgctgagattgatcattactctgatggttgttgttgttgttagtatcccaaatctggcttaaggatttgatcactttggtctcgtcgtctttggcttcttggtcgttttctcgagcttcttccgcttcagcttgctctttaatagctgcccagctttctgagttgacaagaagatatgatttactatctattttcatttgtagtgcctcagctgcacgttgaacgtctttcagaatctctcctaggcttaggcttagcttctccattttctctactttttctccaaacaaacgtaatacttttgctccttcattaccaactctccgaagctcgttactgaaaacatgtcttttctctggagatgcctgccataacatttcaccaaacaataattgaaccattatatctaacatagtaacttacaagccaagtacatcaactttttataatgctgaaaacctgatatatataaagagctaaatttattttagaaaactaaatatgaggacctaaaagctattttatctcattaagtaccttttcattaatatgtttttgaaaagggcctacaattacaacttttagatttcttcacacatgtatgctataacagttatgacacctataacaaaacggattagacattttttcccccggttattcaattcatgtgccatcatcttttcttttcttcacatgctagacatttatgacgatacacactcaacgagttatgtatactcttctattaatcattcaccttagtagcaaaatggagcagagtaataactaataacacaaaacaaattgtttaatgaattagtttaacaaggaacctgtatttctgaaagaatgcatccatgcattgccatgactgtgaacgcgcaatgcctcactgcaccactaagtttgacatagtttttccaaggatggttaaacgttttgtaaggtccatgtggaggctcccatatagcgaaatcaagctgcgaaaacagagctcttttaatgctataggtatcaccataatccggattttaaagatgtgtctccacgatgcgtaaaacataccaaagaatcttcttggcttgtagattgaacagcggatctgtacccgctgtataatggatcatctgaagcttggtacgtgagtatcttcgacggtattctctcgtattcgacacattgcaagtaaccattaacacatcctaaggataaatacaaaaacctgaaataagggacattgaaataataagctaaccatgttataacagattatgttttatctaaccttctagggaatttgcaacattcttgaagtttttagccaccagtttatggagatcttctccggcccatatcggaaataaaaatacattcacaagcaaacaaatggttgcaccaagaccaataagcaaaatcctgtaataagcagtgcttaagaagtctcttgagttgttcccggaaacaagaacgatacaatatgtcaacttgaacactctgaatgcgtattcgtatggtttcatggacgcgtatagtttcaaataactagcaccaaaacctgacatagacaaagaaaaattaaatgttagtatcctcattgtgtgtaatgaaattgtggcgatataaatgttgcaaacctgcaaggaatatgcagattacgatgatgacttcttcaaactctcctgctaaaacagagagctgcgcgacgccgagagcaagtcctccagctaacattgtgcctaatgctctattgaatcctttaaccaaagttgctcctgaaaattgaacataagagtgactcaataagtatgagaataattgatctgaaaatgtaaataaaacagtaaaatgcaaagtcaataagtaaatctgaacagagaaaatagaaaaaatctttgaatccacttatacaaaaagatggattatacaatcaaccaattgatgtctttagttccatcaaatggattccataaacagaaaactcgaaaacagtgaaaaatattcaatccaagtaacaaacaagcaaagaaagtataagagttggtctgaaaatgtgaataatacagtaaaatgtaactcaataagtaaatccgaacccatcaaaatgaaagatggaatccaaaaaaaggaacagtcttaggattaaaagaatctttactagatttgcttcacatgcgcaagtgtcttgagttcaagattccaacaaaacataaaaacaaaactcaaagatccaatcaaaggatcataaactaggctatgagttaagaatcaataccgacgtaatactcgaaaatgagaacgacggtgagaatcgcccaaactgcgaatttactagcatcttgaagcggctctttgagaaagatgacgaaagaacagagtgccaaagcaattcccatcttgatggagaagtaaagtttcctacgatcagaatgtcccagcgcgtacaacttcgccggagcctcgtagagagccctccacgagcaacaccggaacttggagtcacggctatcagcgacgtcgcttgactgccagagaagcttctctgtgttttgctccggtactgatcccattttacctcccattagaaatgattctgacaattctacagaacctgagagattcttgtcgtccttacgaatagaaagatgtttatttatctatttatcaagatttgttttgtactacgcaattaatgcatgccttcgattcatcatctctaaataatcaagtttttttaaaaaatttacaatttggtgcatctacattacaaattttaataattgtccgatttataactttgatgtttttggttgaaatctaatcattaacatattaaccaccaaaagtgtccaaattttttgaaacagatggaatttaaaacgtgagaatttacatttgtggaccagtaatgcataaatggaccggtaaggccgtaatatgattttttgtgactattagttattcagtaaaaaaattaaaaatagaattatattatttcttaatttctgttcaatgtgttaatgtttcttaaactgtagactttacctttttggctcagctacataatattttttcatagttacccgatttagtaagtttttttgttgaatctaaacatcaacataattcattgtgaccagtaaaagtgtcgcagaaataacaacagatatctatggataaacaacctgagaattaactatagtggacgtgtgtaatgtaaatggaccaataatgtgacggtgaacaaatttacacacatatcttaaagtctcttcaagttcaagactctaataattgaattacagacccacagttttggagaagttgcaagtatcaaagagacgacaagtttcatggtcgtgacttgtgtgaatgtgacattttgaaactcctacttactaccgcatcgcatcttactacttcctaactatgctcaaaagccaagccctaccctacacagtgtacccaccctcacatgagatttttcctacttttttttgagaaacaacaattatttatgtattttgggtgagtttgattgttttatccaattattgtatgctgaaaataaaaaatatcgtgtgcacattatataataactacgatgtaagaagtatttcaaacttttactatatatactcatcgaatgatgttcatgaatgaccatcatggtgtctttctccttaaaggctttctcatctcatctatccagtgctacttcaagtccaaagaaagactcttctttggcctcagcaaacctgtgaaaataaagaagacgattttttaagatgaatcatgtgacataatgtaaaaagaatcatgtgacatatataatgtaaaggccactttctcaacaattatttgtttttgataaataaataaaacaaattgaggacatcttgcagcgtacaatatcgataattatattttgttaaaaattgtgttttgattaatacaaaaatttatttcacacaaaaaaatttattgactttgatcaaatcatgaacactaaacaaagatgaggtttttaatttttgtataaatacttgtggctgtcaaatgtcattcgaattaaatatgatatgattaatacttatatgttgagatctttgaattagtccctcgaaaatacttgaaacagagtctgtatttttaaaagtctacttctcaaagcttcaggtttgtattcatgggcttataataaactctgtattcttgacccatttaatgatgggccaagtcaacaaagcccataaatttgatagtcaaactactttgaaactccacccaaaaatgtgaccatatcttccttatccatattctcacaaaatctccattgttctctgagaaaacacaaaaatgatgtcatcaatggcactctcttctacttccctctgctcttctttcatctctcaacatccaaaactctccatcactgcttctcctccattgttccatacccaaacaaccaaacccatctctgtaaaacggaaaatcataactctagcagctccagagacactcaccgctgaaacagtcaccggaattgatacttccgacaacactccacaacaaacaataaaggtaaaaacaacatattcttcttcatcttcttgtctcttgtgttacaaaacccacaaatctttgttgtttgtgttaggtggtgaagccagatgagaaatcaagagtggtactcaagtttgtgtggatggagaagaacataggattaggattggaccaacatgtacctggacatggcacaatcccacttagtccttacttcttctggcctaggaaagatgcttgggaagagcttaagtctactcttgaagctaaaccatggatctctcagaagaagatgatcattcttctaaaccaagccactgatatcatcaatctctggcaacaaagtggcggcaatttaacttctcaataatctcttttttgatttctgcatttcaagaattcactttgtctatgattattattgctattgagagttttttgtttatctaaacaatatccaatcacattcgacataaaagattcattttattggaaagagaaaatgataataaaagcaaacatcaagcaactctgagttattgtttccttgaaggacatatcaaacgcttgatggttgagattttgcagagaagagcttcaccataggatttagagactctccggtcaccggaatatgtacacgttagtgtcactttcttctccaacacactcaccaatattgaatatgtttctgctccaagaaaacagaggaaacaagcgtgagaggaaagaacaaaaaagtgtctcatctcggaagtaagtaagctatatactcaccgatcatcctcgccattatgtcggcgactttctcttggcagtcactacatctgatgtctgctgatagaacaatctcctgaatctgataacacacaagatcaattaaaagaatccacagagttgaatcattctaagacaaaagtgttaagagagtaacgaacaagtggcatggataacgatgcgacagaagcgagactggtttcacttgttcttgaaagcttgcttcttagtgatggttcaagttcctcctcgacgatttgagacagagtagccatgacactctcgttgcacagagaagatagataaaacaggaaatgaagaatcctatagaaacagtctcttgtacaaggaaagataagtaaaacaaaaatctagaatcctaaagaaaccaccaaaccaagagtgggaaacgaagagtgtcgctatccgaaaaggatgagttagcaaaactagtgacagaggaagcccatctttgcttttgctttaatctttggagaaaactaagtttagagactcaagagacatgttaacacacaatagagatataatatatgctttggatccatgacttagtgtccattaatctgagtaagaaagtcaagttcttttggctcctctttatttcctctacattgtttgaaaaagatgcttcactcaccaaaatgcaaccccaccaaaatcattcaagttggaggattctgacttggtcttaaacgaatttaaatagcttacctttttcaccttaccctaccttttggtaagccaatcatctatagcacaacaagagatgataataggtaaaagtttaaaatggtgtaagataagacactcaactttcatcactgttagtggtttataacaagcgctcttactatggataacaaaacttgttggacgattccagaaaacatcaattgttaccagctagttacaactaacaaccaaagagcatcaattttatttgttggtcccctttggaatgctgcacaaaacaaaaccctatgggcacatggacatggacatacttaacttacgtgccattaagataatcaagtgtcctcaacttcgagtatcaaattatgcagaagctattcataacattcaacaagtaagaaaggtacgtatcatatagacaatgaagttgagatcaaggtaacaagataattttatttaatgttacataggttacatgaaaagaaagatcccaccagaccaaaaagaaaacgaatcatctctatgctaaagagagtaaaatgataacttaattctaagagaaaaacactgattaagcctaaaacactagcgaggtaatgttattattacctacttctactgcatccaaaattttgctgattgaattaaagcactatgccctactgtcacaacataagtacacaaacgaatttggatgccattacgagctaatcctataatccatcccaagaaagcttgcgagttaccagtaatcttaaaacccaaaatcgcattgagcagatgcccatcagggtaatatgtacctcacaagaagaaaagtaactaggtccaagctgatgatcatctcgacattaatagacctgtcaaatgctgtccatctgaagagccaaaagtatcttccatgaacttacagttctcacaatccaaagatctttcactagagaaaccatcattcaagctaggatcgtgtggacagcaactgacaactcgattccgcttcctcgatgattttttccactttaagtcagaagtgactaggacatcttttagaagatctggaattggtcgcttaggtagtgactttttggttgtagctactggaagagagatggtgcgtttagcctcagtctttggtgacatcctaccattacaaacaccaacatcagacgacttctcatcatgtttcacctccatctcttttttcttcgtcaaagataggacagaactcacaatatcagatcttgatcttatgtttagccactcatcatccaaccattcccgagattgtctgaggtcattacgatggaaagcagacattttcttttcgcctgagagaaaacagccaaaacaacaataattagtcacacaaaatagtatatagatagatcttcaactgcaataaaaatttgcattcagaggtgtcttaactcacctggcaagtaaacttcaaatttctcttcagaaacttcctgcaccacgatcccttcccaccatccatcacaccaccacacatccacaggcataccaaccccgatgacacatacatcattttctttgctgggcttcagcattggtcttactactttccgtcctttgattctaagatcccccagatgatcaccagcagcaacccgagatgtcaaaatccattcctgcaacaaaaacatgttatcaaactgggcagtaggtacgaaaccaaagcaagggttttaaaatgtgtacctctagctttttagattcatcgtctgcatcctgaatatcttggtactggaccttaaccttatctttgtgtttctttaataccagagccttaaaccaacaacctctgatgccactatcttcagaaagaacttcaataagtgaaccctttttaatgtgatgggaagaaccatcttcgtcacccttgaatatagaagcatctgtaacagccaaaacagaatctggactagatttgcagtcacctttcatgtcacctgcgtatgatacattcaaagtaccaacaggactaggacggcgtcttttccttgatctaatcccaacacaaccaaccaatggagcttttaatcctgggtcagtaccaggggcttgagcaccttcaaatgattttaaaatagatacattcaagtatctaagcatttcttgtctccagtaaccttctagttgtgtaatgtcatacggctttaaaccatcatctccatataatttctggcagaagaaagctactgtctgaacatgcatcggcaccttaagaaatttctcataatgctgaggactaaggacagtagccaagtaatctatgcactcaatactgatatcttgccgattaagagaaaaaaatatctctctgtcattatcatcatcagataaaacagaaccaacctcctcagttttgtgaaaccatcgtaccacaaccatcttcttgcctttagaatcctcataaaggtcttctatatatgcaacaagtctcttatgttgctccgctaaaacatacacaaaatcattcacctacaattaatttatgaaaacagaaaggtcagctttaacacaaggaaaagtaatagcaaatcacaccagcttacttcaattaaaacataagaataaactcacagatattctgacaccattccggagataagactgataatgcttacgccgtttcctgcaagtccaagaaaaacccatccaagagaacgttttgatctgctgaataggctcctgaaatttcctattctgaaaagaaccaaaacagaaaccgattaatatttttcattatctaacaagaaacacctctatattccaaatcaaaacaaaaaaaatagcacttagatttagtttaaagcagtaccataaaagtgctcatattgaaccctccagcatctttttcagtcataacagtagctggtacatctgctacatgaggtatctcacctaaaaattgaagcaaaaccaataacaaaagatcagcaatacacatcaataaacattgatctctaatcagaaaatcaatcaaaacttgaagtatatcaattcgtgcagacatgctcagtaccaaaaggtggaaaccggatctgtctgcagcaaaattaagtcattaataggtttagctgcaaaaggtgcaacggaaccagttaagatctctaacacaaagaaacaatatttccaatttatttagataaacgcacatgatgatactaaacacccataaaatcaaattatcaaattcttcaaatcatgttgagaaaaaaaaaacagattctttcagaaatttcagaaattgatacgaacccagatctaaaattcaaaatttagaaaagggtagagaagaattcgaaagatagattaagaaaaattaccagaaacaatagaatcgagccaaagcgcaacatcatctttagaattaagctttttcaagacagagcgattcttcttcaaagcgtatctaaaagacatgcgtttagaattcttcaacctcccaataacagctagatctgcaattccatctttcctctcgagataataatgaacctccatcttttctttcgtgttcttcacatgtcgctcattccagccgcaatacgacggcgtttccgacgaccacgccattgttaatggatctctcaaatcggaaaaataaccctaatttgagctcttgcttgggtctctctctctctcgctctcaatgcgcgtgaagtgatagaaatcgcagaaagagaggattttggaggcggaatttgaataatataaaaaaaaacagaggagggagctaattagggtttcgaatttggggataagattaagggtggtgattggatccacgtatattgattcgaaaggagcatgattttgttaattacgattcttatcctccggtgttaggcatattactataataccctttaagaggggttgcttccgtcacgattttggaatttttataacggaaaaaaagacaaaagacaagttgtgtaataaaaattgaaacgcgtgatttacggagttttttatttattttagaagacttgttctatttaaatgccagctgtgctttcacgtctttttggaatttttcttttttttagatatttccgtatctgtttgtattttattttaaattttggatcttggtagaaaatcaaatacggaaatgatatatgttcttatcttttgactttgatcgaatttttgggaaaggtttcagatttggtaaatggaacgatttgtttatgaaaagattgcacaaaaatagaaacaaattattttcggacatatcttatgtatactttttagtttggataatggatatggatcatatctatataaatggaatgtttctttttactacgtcactacagctatttaccttcattgttataaaatccatgcattttaaatttcttgacaaaacatggtagataaatatgttttcaactataacaaaaagttggttatcaatcaaatagtatcattatagttgtgaataaactggttctgcttacatttaaaattttcaaaaaaaaataagacctgaataagacgacgttcccaaaatctttcttttccgaccaaccgtttctgttttctactgtttccggccgacatcgtttccttgacgtcggccggttgtttctcttctgctttctagtttcaattcccctgttctagttataaaccattaataatttggccaatgttttccacaaattctttggctctctttgttcaaatcttcataatcttcctctcctttgggatgagtatcaatccgaccacaatccggcgagtttttcggtggtgtgtcgatgcctttccgctgaatatctatttaagtgagtctctttgttctttgattgtaatggactctcatctacatcgtcgattcgttttcgacatgaatttctttttgagagatgatttacaatcccgaatctaggatcttggagactcaaatgttggattagatgatggcaggattaagattcagacagatcttatcgttaaacatcatctccatctatgttcagcgagtattggcctctttctctcactcatggaagcaaggataaagttcgatgatgacgtcttttcattcttgtgctcgaaaatctttacgctaccaactgttctttttggatataaagattgattttatggatccaaaaatcccttgttaaacagattttccggtacgttatggtggctttggaggcagttaatcttactctgagggaataaaaaaatcatcgactacaccaataaaatcgctttttatcgaagtcatatgaagaaattacaaaatcttttcaattctggccattgaaatataccaacaaaggaatcgagattatggatctatcacgggtgatatttacaaccaatatcgaaccatcgcctaacgcgggtaatggaaatgtttgtgtggttagcgatgtaactgatggatcgcaaccctttgattttcagaaaaagttttggtgctatgtaaaaaagaagatagcccaacaaggagatcaaaatagaccggtgacgaaggaggtaaagaaaaataagagattgattaatctgttagcgtgtaaggcttatctacaacagaaagcaacgtgtttttcactttttcgtttatttcgttcagcttaaatatcggcaatatgatttgtagagcttcaatttgtatactcattgatacatttgtattatcgattttaaattaataaagaattgatgatgttaaaaaagttatatatatatatgttttcaacttttcaatattcaacatggtaatagttaatgggccttaaggccaccgaagccttgtaatataaattttctgcaacacttagacaaatcaatgattgattgtttcaccatcaatgtattcgccttttggcccatttatattattttcggcctaatatggcttaatcaacatagatcttcaattcttttttgaaaaaatagtcctagtaaagacaaccaaatatttgccccccaaaaaaaagacaaccaaatataatatgaaatcagtttaaaatacagttttggtttcacttttaacatataaataacattcatgatcgattctttttatttttcgattcagacttctttcaacattacaatttacaaatatattagtattaacccaaagtaaatttggtttggaatttacgaatgttgttttaatttaattccgatcggattatataggtttatcaaaaaaataaaaaaattgtgaggtgggtttatcaatattgaacacccacaacaatggacaaagtcattctttctaatttattggattgataagtacatattacaactatactaatttagtaattttacattacacatccaacgccaagactcattcatcaactaaactcctatttgacaactgcaattcctccttaaccggactactatcttccttgctatgatgaacctgaaccggtttatacgtataaatcttggcgcaccatagataatacacaagattaacagcttgtaacacagtaatcaaccagtaaaaatactcaagcctccctcggttcaaattgttatccggtaaccaattgctcccatccggtttagcactgaatttatgaaccaaagtcaccagcaaagtgctcacatagtttccgatcgaaatcgccatccaaaaaagcgccgttgccgtgctcctcatactctccggtgcctgacattaaagaaatgattaaatagttagttattcggttagagaagtcgttagttagttaacaaaagttagttagactctttaactaactctctgtttatataacagagtatgtataatgttttcattacctgatcgtagaagaactctaaatgtccgatggacatgaaagcttcagcgactccatggagaccatattgaggaatcaaccaaagaaacgagattggaacaatcgtgtgaggtttatcgaggagaccgtgctcaatcgcgacgctctttcgctttacttcgacgaatccggcaactaacgtggcgattatcgagattacgaatccgattcccatacggtggaggaacgtgatgcctctttcgagaccggtgaatttgcgagcgactttgacgaagacgcggtcgtagaagatgattgtggtaagcatagcgacggttgtgaagacggacattgaaccggctgggatttggaaggagtttgttaggtgacggttcatggttttggcttgttgtaatgagaaggttccttgttgagcataggctgtgattaggagaatcccggatgctccgattggacccattcggatgacggatttgagttcttcgactcgatggactgtgcttagcctccaatggtttgggatttgacccggttttaaattgtcttcctccgttactattgccgccttgtccaagaaactacattgaagagcagagtttgccaaataataagaaatgtgcaaccattttaaatttaatttggtgaaaatgtttagtcatagttagcttttagaaaataaaaataaatgaaaactctacaactactcttagttttatattttacaaattgagcaagacaagtaagtgacaaatgaaaagtgattaggccagtcattatattactattaattatctaaatcttactattttcgaaataggtccaataatccaattatttctgcatatacagtatatgccaaaaaaaaaaaaaaaagtgacaactttgatatgttgtcttcttgcttttggaatttcctttctttacaatgaatcaccaccgattacaattattatgtaagtttttggatgtattttgtagttttacttttaatttgtctggtttcacccagttgacaagttgttgtacgattactcaattgtttacgtttactatattgatatttagtctcaggtcctattgacagaaatatcatttttagattcagattctactacgtctcctcgtgactatctggatatataatcaaaacatttacattatcttatagtagtaaatagtttgatatttattccgagaattatatagagataatgaattaggacttagacaagaagaacatgaatagaatagttacctcatgtgtttggtgtgggtgagtttaccacctaaggagataggtgcatcaatctcgtcgttaaaatagagaagagagggatcagaaaccatcctcagtttccttttgcgaaatgccgcgactcccacttggatcaagcgggtaaatggactacccgcgggaaccaagtgacggtaaagttgaaaaccgccgacaaaagcaataacggataagaacatagctactgtcggaatgcctaaacctagaccccacccaacgttatcttggatccacacaagaaccgtcaccgccagtaaaactgctgcacccatgcaaaagtagtacctataatgcaaacccatcaacataattcattattttggtttgtaataagtattacattatttttagtttagaaaactatcaaggatatctatctgtataataatttatttttaactttattaattataagaaacttgttcttttcctaaaattagaagaataatatcgagtaatcatcaaacacttgcacataaatattgatcttaagacttttaaaacacttcaaaaaaaagggctacattcgctaatagctacattgttttactcatagttgtgttacaaagtcatgttagctatttagtctcttagggtaaagacaaaatacagtagtatggttctaacatgttaggtcatcctagtactatttcaataattaaacacctttataaccacttcaaaaaagcaaaacttattaaaagggttttaattatgtatttataaatgtagagaggtacgtataaaaataccagttgaagtagttccaagttttggtggtttgattaggatccgactcgtcgaactgatcagcaccaaaagcaacaacacatggtcggatcccacccgacccgagagctccaagaagaagagctacgtaaagtatactcaattgtgctgtgtcagctactacacaaacctcttctcctttacatggtggtggccttagcgttggtattattgccgatatcgtaagcaacgtcatcccctgttttttttacttccatttaaaatttctagtaatatagaatgatcaagaaaatgacaactagactaagtttggtccaaagaaactgagccttggttaaattcttccaatggttttaaatttatttgtatataaacttacgatttggtagatgatggaagcaaaagtgatggtccaaaatcggccggcgaaagagtcggcgataaaggcaccaaggagaggagtaagactcgatgtcccggcgaagtttgtgagagtgttggctgctttggttaagggaaggtgaagctgtgttgttaagtaacttatcatgtttgcgtgaaaccccaccaccgctaatttttcacatatctcgttcgctgaatatatcattagagattatatatcaacttcatattttttcacaaaagatcaaataataatcatattgaatatattttgttttttcataccgaagatgaagggcatggtaattaatcctccctttggtcgatttggtctcccatggagttgtttttcttcttcactgatcttgttcttgctttgctcctccatgatgtttctgattgtttcttgtaataattagtaatgttttatatattacgtttgttgtaaaacttgtaagtgttgaaaatggcattagccaggagggcaatatttatagtgtggctctcgtccgtacgagatgtataaaggaacgggacagtgacgtctactgattaattaccagccacgaattaaaaatttaaacaagatttggtttacgtggaccggattgaatttctggattccggttcatcatatcttcgaaattggtattttgaaagatgggacaatgcttcaaccgacatcatactagtcctagtttaccaatcaaccattccggtaaaaatttatgcggcgatgaagctacaaaacattattcaccgaggtaaaaaaaagggtttattgaatgtctgttttcagtaaacatgtcggatatatatgcattattccaatacatctttgaatatacaagaaaaaggttttggattcacaaaggttggtttacttttggtaatttcagataccaaagatcgaatgtagatgaatattatactatatatggaaaatatttacttagtagtatgagctagtttgtcttatgatgaaaaagtggtccactattatctgataaatctggatgatgcatgtttgtggtggttaggtggtatatgtttttacatcaccgttcagacacattttccataaattatttgcttcgatgtgcgcttgtttgtgaattatttacatactaatattaagcccgtacatagtacgggacaaaactttagccaaagaataaactaacaatatttagaaatttttaaaaaaattacaatcccaagtcttttggttaccgggtttactcgcaggtcaagtcaccaacactgctatttaatttttcaattatcaatgatgtgaagattcatcttgactaaatatagcgtacaattatcagttctagacttctggtacgatccctataaaccaacccgttttaaacttgtttgagataaacattgactctcatcaataatatattgtgagtttgtgtagttattatacgtaaataagaaataattttttatagttttaaagatttatcgattttaaattaagtagtccgtgtagtacgttttagcatgcgtcagaaatggatttgcaagtgactagagagtttgggaaatcagaatcatccgaatgaacatcacatgcatgtggggactgtatctccctttttgcactccaatctcactctctagtgccacccagtgactttcactttcatacgacttctcttcttctttaatttaccacccaaaaaacatctctctgttgatttgtaaactatatatgaatattatattatcaagtaacgtagtgtataaccaagttgtaatgccttcacgatattttgttacctttttttttcttataatcattctgacatcaggatgctatatcatttctgttagttaataataaattagtcgaaagagaaaaaaggtttgttttcctgacgtaaaaaaaaacacaaaaagaaagaaggtttgtcttctttctggagaggtattgtctttttcatctagaaacgaatcaaacgattatacattaatgaaaataatttttctttgaagtatatacgcgtttattcacgttttatgggaaaaccccaaaagaaatgtaatgcatgttgataatataagtctaaatcattagaaaatgtattacatacacaaacacagtcgcatatcactaattcatttataaacagaagacagaagtttttgtgttttcttaaacgtatgaatgtttctatacatggtacacgagactttgttaaaatgtgaccaaatcgcccactctacgtcaattacataaattcgcatgatataccacttgcaatcatatatatacaaataagtgcatgacattaatttagtctatattgcagttaaagttcgactgggttaaaagacatggagatattgtcagagagtcagatttgaagtatattcaacaatatcacaaactgaacttttgggatgcatatcacaatatcagcataataaagttttatgcggatatatcctccttatcatggacaaattctttaatggattttattaagtaatagtataattaagaataatccatgtgtctgtgggtttcatcttcttcccatgattggtcggtactctaacatgtatatgttcgtaaacatgatggccttaaaagtttttttttttaatatgttttattattatttacatgcaaatttaaattttcattataaactataaacgtggttttctttattgaacttgtatgaaatagatattaaaaatgaacagatgttttcctaacatttcctcctctaaataatcaaatcggttttcacaatagtttaatagctaattttatcaagaattagatactagctacaatccaaaaatattattgaattgtcttctagcttatttatatataataataataataataatttaaaaaaaataaactcttttgtagggtttcattcacacctcaagagtttagatttttttttaatatcacatctcgattataatagaaatgaagtaacgaaataaacatcaaagttatataaatttacgatcaatcaaaaataactgaaaggaaaggaagaagaagaagaagaattggcaaagatcacatgagactgcctctttctaaatctgatcaacatataatagctggctctctttgcctccacacacgtatgatcaagcttttgttcccatctcaaattcggcaagcctatctttctcccactttttgtttgtttgtttttgttttttgttcttaaactgaaatcgaatttgagttgcatatgataacaatctcgaatatatatagtgttatatcatccatgtagagttgataaaagataggatatttcaatatgtataaagcaaagttagtaatacaagatcaatcatatatattggatcataataatgaaaattttgaaaattaaagtcctaaattatgccctaaagtataaatcctaaattatgatcaaaatataaggaagagactagactctagagagtgaaattttgatgttcatcagaaaaattgttggttttaaaaacaacattatattaaatctatatgagaaaaaaaaacactcaaaaccaatgaacataatatttactttctcgtttcgattaatctctttttatggagaaagaacgtttatgaaataaggattaatttaaacataaaattatttttaactaattttaagataaattatgagatccatactttttatttaaaacaattttttaataatattaacgccattgtataaactatccattgtaatattcatatatctccactaacttgttgcaaatattttaatcacacagatgattaatattcatagagttcaccattcatgagaatgacattcaaacacacccacacacacaattaaaagaagggaaaaaatgcgatcgtatggttcatatatatttttgcaaaccagtaattttaatttccttccgacattgacagtaccactaccaatgcgatttttagaaatacaactgcacaaagtaattaaagatgtttcatgctgattgggtcacttttaatatctagcactttctgattattcaatgatgcaatcattataatatcgagtgaatgctattacttattgtagcattatcctatgtgtactgtgtaggaggaaaaaaatgaaatattggtaatatgcaaagtgattgctgtttggagatataaacattttctattaatattctcaacattaattattaacgtaataacatactaagtaacgtgagattttaatttgttgaagctttttcgacatatatcttagactagctgaggttagtttttcacgttagttttttttttctaattcgtaactgacacacaataaggcaataacacagaaacatagtgtagatacatttgaaaaaaaaactagtgtgtctacaatgccacatatgaaaagaaatcaagtacatatataactaaaaacgttgtatcaaacaaagataagaaatcttacctacaagaactatttcgacaataattgccactcaaacgggaaatttgatagagattgggtctcgtggacgggtagttgatatgaattgatacctaaacgatttgaagtagaaaaaaaacatcaaagggatagaaaaagtggagaaaatacgtaaccactgcgataccaaaacacaacgtgtcccatcattatgattattgcaatttttggtgtttgaagattggttactgtcattatcctaaagattggtccatgccactcaaaattgtagtttctaaagtgaatttgtatttcttcttgacggtccatttcaaatcgacatagagatagtgcacgcctaaaaacaatgacacttccgttgttatacatattaaagtgtttcgtcgttttggaaatcaacgaatcttatttaccatttttcttctgtgtaggatatgaagatgatgtgaagtgtcttctactcccatgttatcctcaaaactgtgaggcctttttaagcctcataaaactataggataaatcgcaccataacaaaaattacaatgccacgttacaattcgcaaaaccctagatatcaaatccaaaatttggaaaatgttataaaatacgttttagatttgaaatcttatgtgtttggactgtacttaaataacttaattatggtacataatatcagtcccgtctctgggggaggaaggataggcaaatgcccagagtcgataaccagtttcaaattttttattaaagttaaaagtcccaatttttcaaaaataaaataaaatttattaagacattttattttattaataaattttattttattttgagttttgccatgaactctatgatgagttgagacggactacgtaatatgtagaacattaacatgggatttgtggtgtaaatgttttagagttagaaactaaactaacactaaaatgaaaattttggaaaaataaaattataataggatattgaaaattttgtcaaacattggcttatgcttatcaatgttttttagaatttaatttaacagtgtagggtctctataaacgtataaatcatctttggcaatataatatggatatatgtaagctgattaaaccagtgtatgtgaccaataaacagcaatggattcacaataaggtcatattaatttgaaccaaacctttaggctaagaaccaaccatatgtgtggatcctcttctcatagacactacagtttgggctcacttcttgtatctgcgtaacatttcgggccaatgttcttgtctctacctcagtataaacaaacaccatcataattagacgtctctgtttttcaaatttgggccctctatttttttgttttggtataactttgggccctttattttctatttaactatacatcttttttttctctaaatctggttgaggttatgaatcaaataaattaaatttaacttaaaatttaatactgtggtaatattttatctttattcacgaaaaaaacggcccaaagaggatggaatttatacaaaattgaatatgtaaaagttgaagaggcagagagggaagtcacgagagtggaggaagagattggcaatggcatgagagtacacgtgatgtgggccttaacgtacccacgtgtttaaggcccgctttcttcacgccgattggcccaccctttctcctctagcttcctttattatacaatctcctttttcaaaatttgtcagacgcacaaaaaaatatcttctgattttaacggccgtatgtgtgaggttgaagagagatcacccatgttgtatacttgtatttatatatttacaataaaacatgtagtctattattagtttctgttaatgttatcaatgtttttataatttcacttactagaggttttgatgcttaatttataaaagtgtgcaaattaaaattttagtggaatcctttaaacaaatcgaaaatattaataattcattatatccaattgttgtatgttatttacttttgtcattctttgatagtataagaatttatgacttttctggtattttagaagaaaaaataatcacatgattttttttaatcacatgtttggtgctacgtataatttatatgaattatttaccgtcacataaattatagtaaagttttgttttgtaatctattttagaaagacaaaaacttcataattattaagatctctcttatgtatttttaggtctacaaatctttgtaatgtaaaacaacatttaataattaaaaaaaaaaaacatttaagtaggaattagtaatgaaataaattattatgtaacagtcgtgatgattctatcccaaaaaagaattaaaaaaaaatggtagtgatcaatatctggaatagagatttgtcttattttaatggagaaagaggcgaggcagagactggtgaggccattcctcgagaactacacttatgctttcccccataaatccatttcttgtctatctctctacttttcttcttttcatttatttaatagttaatacggctttgctttttagttgaaaacagtaaaaaccgaaataaaatgtgtttcgtcggccgatggagattgagaaagttagttaaaccaatgatgccgacacaaaacaaaaagttaatccgatgatactattttcactactgtatcaatcgattcgtcggctacgtggtatgttacgaatcttaagagttattttaatcccacaatgttgaatgatatgcaaactattgttaaaatgtcacttaattgttatattaacctgaccgaatagctataaccaagtcttcgtcaaggctgcgtggccggttttgggaacgtatgaaaattctttaattcttatattattaaattaaagaatttatttcttgttgctatttatttatttagtgttgtaaatagtgttgcatcaactatgtaaatgatgctatatcatcacattaaacttgtgtcatctttagtgtttcataagagagttttgagtgtaaactcacatcaaaattgtgttttagtgtcccatctgcttttgagcctaaaaatagaggttttgattggctaagtcctattccatttttatcctaattaaacataaaaacaataccaaagcaatataagaaaaaatcattttcacttttttatactgtcatcttgcactgctacagtttaacgttttaattatttatgtattgtttactgtaccgttaaagacttataccgctttgagttaccaatatgatttgcattttggttgaatactagaaaatgatattttctatgtatgaaaatgatattttctgtgtacgaaaatgatattttagtttgttcttatcattaacatttatttgtctgttataatatttatatttagagttcaatgttcagacttcagagtataatgccaaaaagaagccaggtgaggaatgcatctgaaatacaaatttggatctcgtgaatcattcacatcaatacagcgattaatttgtgatataatttacgattatattatttgtatagtgaaacaaaataatgtgatggtagtacttgtagacaatgtgcaactccggaatcgagatgttacatgcatgtatgaatatcgatcttggaaccttcttcatttttaataatttttcatgccctaccttaattacgcttgtcgggagtccaaaatccaaactccaaactaagattttgcatctcgttgtatcttgttaaattcagttttattgtcacggacacggagtatatattttatgcatggacaaacattttcttgaatacttcaaaagatgttacttgttagtaaaaatatggtaagggctaaataaacgtagaaattgagcatagagaggaaattagtttgggaagcgagaatcacgcttcaatttagagaccgaaatgtatggagccacgttttggaacatatcacctcctttgattttctttgtttttattaattcaatcttttttatttttgacattaacaataaacaatctattggtcatcgcattaattctcaaacaacgtaatataaagatatctggtccatgtgagcataatttttcaagatattgttataaagactagttttcaatatttattttgatgccccaaaaaaactacttgtatccaagaacaatacttaattagttaatagtttaatgatgatggcaaaatatatacacaatacacttgcctattagtgtttgcaaatattgatgataaaagaaattagtgtttgtcatgtttcatataagatagatgatagatcactacaatactcatacacacataattcttaatcacacatatacctgttgtttatgtaattattaaaaagaagagaatttactctattccactacttttcttcaaaggtttttcatttctatcacttttgtttattatttttgaatctatcatatttgtatgatagaaataagacgatttcattattctcattttcataatataatattatatattgaatgtatagttgttaaaaaaaagattatctattgagaaagagaaaaaaaagatgttacaacagtattaataaaaatgatatatgtaaacaaaaagaggataatgtgatagatccaaaagatttagggaacaaaatagtaaaaacaaaaagaaatttgtaatttgtagtagttttgttaattttccttaaaccgcaaaatcatattctactatttatatcctcgtttagtgttcacaaaacttatcaagaaccataagctaaagagggttcggttctttaaacccctccatctctctctccttcattacactgtagagtgttaaagtaccactctatagccatggcttcctcttcttcatctctagctttctctctttctcttcttctagctttaatcctctgtttctcacccacccaatcctacaaaaccatcggcaaaggctaccgtttggtctccatcgaagaatctcccgacggtggtttcattggttatctccaagtcaaacaaaagaacaaaatctacggctctgatatcaccactcttcgtctcttcgtcaagtaaaaaccaaatcctatgtttcgcaccctacattacttaccaaaactcttcttgatttctaaccgttagatttgtttactctttccaacaggcacgaaactgattcacgtcttcgtgttcacatcactgacgcgaaacaacaacgatgggaagttccatacaatctcctcccacgagaacaaccaccacaagtcggaaaagtcatcggaaaatcaagaaaatctccaatcacagttcaagaaatctccggatccgaacttatcttcagttacacaacagatccattcactttcgccgtgaaacgtagatctaaccacgaaacactcttcaacacaacaagctcattagtgttcaaagatcaatacctagagatctcaacttcattaccaaaagaagcttcactctatggtttaggtgaaaactcacaagctaatggtatcaaactcgtacctaacgagccttatactctttacactgaagatgtttcagctatcaatcttaacactgacctttatggttcgcatccgatgtatatggatctaagaaacgttggaggtaaagcttatgctcatgctgttcttcttttgaatagtaatggtatggatgttttctatagaggtgattctttgacgtataaagttatcggaggtgttttcgatttctatttcatcgccggaccgtcgccgttaaatgttgttgatcagtatactcagttaatcggaagacctgctcctatgccgtactggtctttaggtatgttcatttactgctctgtttttttttgttattgttttctctctctcttgtcttaatgttttgtggtaatttaaataggattagtgattatgtttgtggtcctatagtgttttaagcataggttaatgtcttaatgatgagtattagtattggttcaggttcctataagtttgacttttagtcaaacgaagagtcacgtgaacatagattttgtgtatcaaccaaaccaagtgagatcgaaaactattaaattaatgttccattagtgttgatatttcattgtaaagagtatctgattttccgacacaacttttagaatagaaaagctttacccttttctgagggatattggaaagataatgaaaagtttcgctttctaattatggtgtttccaattaaaagataagaacgagagattggtctttgctttccatttttgttgatcttgataagaatgattattgcgattttatttggtccctataggatcttgaaattggaccattatatagacatggaccacggttcttgaaatgagttgaaaataaatgcaaatcttgattttgccatgtgatagatttatggttatactaatcgtttatattaatgttgtgttgtaggatttcatcaatgtagatggggataccataatctatcagttgttgaagatgtggtggataattacaaaaaggctaagatcccacttgatgtgatttggaacgatgatgatcacatggatggtcacaaagatttcacgttgaatcctgtggcttatcctcgtgctaagctattggcgttcttggacaaaatccacaagattggaatgaagtatattgtgatcaatgatcctggtattggtgtcaacgctagctacggtacatttcagagagccatggctgctgatgtgtttattaagtatgaaggaaagccattcttggctcaagtgtggcctggtccggtttacttccctgatttccttaacccgaagacggtttcttggtggggtgatgaaatcaaacggttccatgatttagtccctattgatggtttatggattgacatgaacgaggtgtcgaacttttgttctggtttatgcacaatccctgaaggaaagcagtgtccaagtggggaaggtcctggttgggtttgttgcttggactgcaagaatataaccaagactagatgggatgatcctccttacaagattaatgctactggtgtcgtagctcctgttgggttcaagactattgctacaagtgctactcattacaatggtgttcgagagtacgatgctcacagtatctacggattctctgagaccatcgcaactcacaagggcttacttaatgtccaaggcaaacgtcccttcattttatcccggtctactttcgttggttcgggtcaatatgcggctcactggaccggagataaccaaggaacatggcagagcttgcaagtgtctatctcaactatgttgaacttcggtatatttggagttcccatggttggttcagacatttgtggattctacccacaaccaacagaagaactctgcaaccgttggatcgaagtaggcgcgttttacccgttttcaagagatcacgccaattactactcaccaagacaagagctttaccaatgggacacagttgcagactcagctcgtaacgctcttggtatgagatacaagatccttcctttcctctacactcttaactacgaagcgcatatgactggtgcacccatcgctagaccgctcttcttctcattccctgaatacaccgaatgttacggcaacagcagacagttcttgcttggaagcagcttcatgatatctccggttctcgagcaaggcaaaaccgaagtagaagcattgttcccaccaggttcttggtaccacatgttcgacatgactcaagcagtagtgtccaagaacgggaaacgtgtaactctcccagctcctttgaactttgtgaacgttcatctttaccaaaacactatcttaccaacgcaacaaggcgggttgatttccaaggacgcaagaacaacaccgtttagcctcgtcattgctttccctgcaggagcttctgaaggttacgccaccgggaaactctatctagacgaagacgagcttccggaaatgaagctaggaaatggacagtccacgtacgttgacttctacgcttcggtcggaaacgggacaatgaagatgtggtcacaagttaaagaaggtaagtttgcattgagcaaaggatgggtgattgagaaagtgagtgttttgggacttagaggagcaggacaagtgtctgagattcaaatcaatggaagtccaatgacaaagaagattgaggttagctcgaaggagcatacctatgtgattggtttggaagatgaagaagagaacaagagtgtgatggttgaggttagaggacttgagatgcttgttggaaaggattttaacatgtcctggaaaatgggtatcaattaatttacatgtgagagttggtaaactattgaggaggagaatgagattatttaaaaaaaaagggtaatgttttgttcttctccatttcggattataagaaagaaaaaaagaattagaggtttggttttagattgtgtctctgtctttttattaaaagatgctttagtctgaataaaatttgaagcagaagaagtgttacttcattggcttatttacttctttgttttccattggagtattatcttttggttctctcaattgtttacttctttgtttccattggctttagctcccaagccagaaaaccagacaatggataagtttttgtgaattcctaaatatttcagagaatcagaggaccagatatgttttctgacgacatctttgtgtacaagatcgatgcagagatattgggactttcgagaaaagtcatatggttcctttcacgcattacagtttgggttgggctttgagctaggtttgggtaggacagtctcaggatatgacatcaactaatttggattcatataagataggtaaaaatattaatgtagagactataaaaataacaataatcttttattattacataaaaacgtgaaattatacaaacaatttttcctagaaagtatacaaaacaattttctttaacattttaaagcatatttttatggtcatctaaataaattatcacattttactttctttttttttaataccaaaaacctattatcaaacacaaagaaaaatatcgattataattctaaaatatattgaaaaaattttactctaggaagacaaaccggtcacctaaagatagatgtataaccgatcgtataaggcttaggcttggtactaatttcaaaaaatacatatattgatattacacattcgaaattgactatccgttaataacgtgactacaatattatgtgcgtcaacatttatttcaccatatatcaacccgtcaactgtatattgtgtcaccaactcacctttaaatgtgcatggttatgttctaacttgtattgttgtgtcatcattttggcaccaaggatgatgcaatcacttgaatatgtcatgtaacggccgataataagtttcttttcttccttttcttcgctcaaagttggttttatgcctaaccatttgatatacatttaatatcaaaccctatgtgtttaaacttgtcaccctcttgagtgtcgatgtccttatcacaaaacacatgctaaaatcttttagtaaagacaacagaatctaacaaagttaggtaaagatttattactttaaactaattccaaaaagcctagtagatgaaaaagtccagcccagaagatccaatattcaaagccctactcacacatctaaaaaacttcaattattttgaaagagaaacaataatattttgacaagtcgttgatgcggttaattaaggaatagtttaattgctaaagcttttagttaagaacaagtgactgtagtgagtcgtggtgagagatgggaaagaagtttccactctccaacaactttgtaaactattattcaacttgtcggctttatacttcacacttcgttactattgttagatctatcaacaataattttcccgtgtggacaattatttttgatttcaggtattattgtaacatattatagatacaagaaaccgacatattgatactactgtatttgtaacaggttctttttaaccataggtccatagccaagttaaaatatgttttttatcctttgttgttaaggttttgaccatgaattacatctgaccagaaatagtttttttctttgttgttaaggttttgattttcacataatcacataagaccacaaaaaaaaaaaaaaaaaattataataaaagtagtgacgttgggaaacgagagaacagagtccatcgcagaggacaaacgggcacgtggcgagagtgaatacgtggcaggagatgagagatggttaggtatggtgactattttttgggtgggaagaataatataatggcgggaaagtaggacccacctagcagaggcggctaaatggcgggaaaaaaagtacagaggacagacacagtgctgctttgagccacgcgccaccgcttgcgtgccccacttcacttcttattgctttgtgcccaagctttttctttttattttatactattgttttcattttttaacttttgaagattataaatttcaaattaaatatgttaaaatagaaagtatatatataaaaaatctacatgactcactaatgatttgtttattttgttcttttattcaaacccgattttggaccaatccgtcaaaatatgggcttgtgtgatagttttttaacagttttcttatcatgtaaaactgattgctttggaaacttccgacaacagttgagtttttaataaatttagcttcaatagaggatcatcgattcctagtaattaacaccacttatcatggttcttgtactaaataaaatcttaaaataaaattagacgaatgatggtaattttcttgcaaatttagaacataaataattacaagaaatttgtagtgaaaatcatggattagattggttagaattagggcattacactgtaccagtcttttactagttgttagtgagccattgcaacgaaatacgaaatcgaaaaccaaattggtaagacatgattgttaaaaatttcacacgtataaataaatggtggttttgtgatgcttagactaagtatttctaaaaaaaggtttagaactctctcccaactattttgctctgcttgaaagtgagaatagttaccactaaataagatactatcaaatgatgttttgggatttagaaaaattacgaatgaaaaaactaaaaatattttggttaacaaaaattaattcctcaaaattatgtattctcttttaaaacaaacatgtatctaaagcgctaatatttgtttgataagaaaatggctaatacttgcctatgaacttatgtttttttttgttcagaaaaaaaaaacttatggaattttgtttatgtgtgtgggtattaacaagtgctaattagatgataattttttcaaatgaaaatcgcgataatgcataaaaaattgtcgtcaattttttcaaacacaatgaaaatccatttgggggacaaaggaataatttagaacaaaagctatagagtttcaaataaggattcacacaaaaaaaaaaaaaagcccagagtatttactgtcgaagatcaaaaaccaaacacgaataaaaatactttagaaagaaaagttatggtacgtgcagcatttgcagagattagtgattactaattaaagagattatatgaagattaaaaacattggtctcgattgcttaagaataatttactacaaatagagttgaggaacgaggatcatgaatgcatgcactgacctaacacatcttaattaaagcggcttatcacgcaccaaaggaacatttggtaacgtgaccaaacaaaggaaaaaacatttggtaacatgttcatgttataaaatatttaatagtttggattttggaatgaatattgtgggggtatacttttatggagctcacgtgatagagctgcaggaccattaaggacatttctgcctctgctaacttggcaggtggcgaagagccgatgcttcttctttcacctacgtggtgttcccatgaacccatatcttgttctcacgtgcatctcacatgccagacaattagattctctacctaaaacttttcatgtttatttatttattagttattattattacccacaccgggtcgtgttcatggccctattaaattttgtcacacatctagagactttttactgattttatatgcaatatggaactgatgtctctttcttggtaaaacgagtatatatcatttagtaaacataggttggaatattacaatagtacgaggaagaaaaaagaagactgaatgttatgaaaattgcaatttttatgctatataccagttgcatcgtgtataaatcactgtattcttcttttcaatcgcgattatatacttattgtaaaaataaaacaaactaaaagtatcagttgttaacctatattcgacttgtgtcaaatcctaatacgcaaaatcatctattttcttctgaattc

SEQ ID NO: 126 - DNA, 101845 bp, Arabidopsis thaliana
aagcttttctctacacatcttcttttgtattgtcaaggaattcgtacgttacaatataaaaatcgcagcttctttcttacaaaagagttcaaattatatctgaaattattgtgaaccgtgtttttgccattgctggttttggtcatgacattctaatagagtcagatagagaaagtagcatccatcaaaattttcaaatacagtatatatatatatatatacacacacatttttctcataaataaaaacctaaaaatatacacataaatacgcacacgtgcatgtatatttgagtgtatacatgtcaatttccaatgtcgtatattagacttccatctaaataaactactaataaaaatttggtaaagaggaatatttaaggtaaaaacaagaattattaaaaacacaaaattaacttagagcttttataatgaaatgaaagtgctaggaaagcaaaagggctttttgattgcaagcttgagactaaggtcatgatgatacggccagcctttcttgagtctttggtcggtccgacaatctgtgtgttttgtgttcactctctgtttttctttcatttttttcttatagtttatttacttatatttcggttatagtgtttctcaagctctagctcatatatcctataactataaggggatgtgatttaaagcaaattttggaccaatcactatgaaataaaatattactaattttgatattttatttccctgatagctacactccttagttgagctttccgtaagttgaaagcaaagacgacttgcagagcaactttccaagttgcaaaccacacatccatctatagagacatatcatataaacaaatttatttaggaaaaatcctagaaattgtcaaggtttactcattagatgatactctaaattacacccataatatattggcttgctaagttgcaaactatccatacatttatccatatacatcgtaagaataatttatataggaagacctagaagttgtaaaatgtgtatgaataaattccaaatgaagacctagagcttgtaaaatataaattttaaatctagatatatatatatatataaaatccataatataaaccttttgtaaattatgttataagttataacaattgtaactttaagacgagtttactattagcacttgacactagtattttgcaagcatttaattttatgttaaattttgtttatttataggtgacaatatgggtaatccagtccaatttgatccataatgtttatggggtgaatgttaactaggtgaacgaagaacgtaagccatttagtaaataggttgaccatataaaatgttctagtttctggtatgaggggaggtaaatgcctattaatctatctaatttgatgggtcgaaaatcaaaatgataaaatagttctacccataaaatatttttgtaataatttatcacatattttcataattaatagttattacaatcggtatcatatgtgatacgttcattgtcttcacatcatcatcgcattatcatttttatcatcatcataacataacgatcatcatttcataccatctccattatcatcataattttgaaatcacctttatggcacaaaattttggaatcgtgcttttgcaaaacaaaacaaaaatatagttttctctgcaaaaatcatgtttttacgaaacattgaatatagcggaaaattgtggatttgtgtttttagcaataattattatgaaatacttttagctggaagttgcgaaattacataattcacgattcattgaaattcagtttttgaccaaaaaaaacaaattgtgaaattatatgatcatgatgatgataatggggtatgatggtgatgatatgataatattatgatatcatgaatataataagaaacgaatatcatttacttttttttttagtttttaacaaaatgtgggtaaatattggtgaatcataaatcttttacaatctaactcatttagcccattaattccttatggtcagaactcatttgccttatcaatataatagggtcataatatttagttatgaggatttgaattcggatgatgacataaggaaacattagtatcaattattagattacatgaatttggttaatatttgttaattagtatcatggttttatatcaacgagaaaacaattgaccaaaaaaaaaagataaccaaatcactatcctacacaatgttatgtgctctcccataactagttagtggtctaatagaagacaaataatcaattttttgttgatacctacaaatttgtaacgtatattatgtggtctctaatacctagtttagtgctatagcgtagattttatttatataaatcaattaaatctgtatagtgccgactcatatattttcgatgctctgaaacaaatttaaaagatatgtattatgtgtcattttgtatatataaattctttttgtgtctttttatatatacaaattatttttctgtgtatggatatttggcgatcgcattgcttgtccatatacttattagaaatagaaatagaaatagaccgtgaagtactaaatgcgtaaattaaaagatagataatctaaagaatcttaaacccattacctttttttttttacctttttaataattccaccacaacacaaaacacaagttgcaaactccacatatcctgcaaaccattggtaacaaacaaacgcatgagtttcctatatatgtctgcgtctacaacatttgaaagcaaacttttgtctctttttaactctcttaactttcgtttcttctcctaccttcttttaccaacctttcctttctcttacacacatatatatatacatatatagagagagagaagaggacaaagagttgaaagatgaagactctcatgtcttcatagaaacaagtgatatgtgcgctaagaaagaagaagaagaagaagaagaagaagacagttctgaagccatgaacaacatacaaaattaccaaaatgacctcttctttcaccaactcatctctcatcatcaccatcatcatcatgatccttctcaatctgaaactttgggagcatccggtaacgttggatctggtttcactatcttctctcaagattccgtctctccaatatggtctctacctccacctacctcgatccaaccaccatttgatcagtttcctcctccttcttcttctccagcatctttctacggaagtttcttcaacagaagtcgagctcatcatcagggattacagtttgggtacgagggttttggtggagccacgtcagcagcacatcatcatcatgaacaacttcggatcttgtcggaagctttaggtccggtagtacaagccgggtccggtccttttgggttacaagctgagttagggaagatgacagcacaagagatcatggacgctaaagctttggctgcttcaaagagtcatagtgaagctgagagaagaagaagagagagaatcaataatcatctcgctaagctccgtagcatattacccaacaccaccaaagtaagtccaaaatttttataacataaattttcatacataagtaaaaacattcatcaatcacacaccgtttaagttttttgtaaataaaaaataatactaaaacaatgtagagtttaagtggaaaaacatagtagctgcgacatgaaagtttatgtcacattttgtctctttttatttttttacatttaggttttataaaaggagaagtaagttattcaaaggttttctgttttgatcaatgatcttgtgggtatttgttaaagtcccgagagagaatcagtcagagactgtagtataaataaaaaagcaaggaatatggaacgtctatgtcgtcgtttggttaattgatgtaataaagagaaacaaccggcgctgcttaaaaagcataaaaagtcttattgccggaccaaatcataacttctacgaccacataattttctcctcgaaactatacaaatatgttttttcttcgttttttttaatgcagacggataaagcgtcgttactagctgaagtgatccaacatgtgaaagagttgaagagagagacttcagtgatctcagagacaaatcttgtcccaacggaaagcgatgagttaacggtagctttcacggaggaggaagaaaccggagatggcagatttgtaattaaagcgtcgctttgctgtgaagacaggtcggatctcttgcctgacatgattaaaacattgaaagctatgcgtctcaaaacgctcaaggcggagataaccaccgttgggggacgagtcaagaacgttttgtttgttaccggagaagagagctccggtgaggaagtggaggaagagtactgtatagggacgattgaggaagctttgaaagcggtgatggagaagagcaatgtagaggaatcatcttcttctggaaatgctaagagacagagaatgagtagtcacaacactatcactatcgtcgaacaacaacaacaatataatcagaggtaatcaattttttacttaaatcgctttttttttcttactttcggtgtatctactacgtgtgttgtttgctggttatggaaatgaatgttgtacgtcacgttatactatagatatatgtgtgtttgtgtgtatgtataacggaagtatttgtatccgttgtggtcttggacttttggtttggttctaagatacttatttttaaaaacttgtatcgttgagttggttttctagatatgcttaatgggagtatgtgacgaaaaaaaagtatgatttctgtaaggcaatgcatgggtttggaaaattcgttttctcttgtcatgtgggaggatttgaatttaattttggcttatttttgcaattgtgtgaatgagaccaaaaagagacaatgaagaagaacaggaaacgtaccaaagatgatgtgtatcattaattgatttagtcgggttctgtccgggggaaaaacaaaaagagacaaatttgggattctgagcttcgtacgttgatgcttctctgactcttttgccttgtgtatttatgtgttctgtagaatctttttcgtgtaacgatttacatatattcaaatattttgctttatataaatttgcatcatggactggtatgaggtaaacatcgggaccaagactaagatataaaggacgtagccaattagttttttaggttggtccatgaaatttaacatggtattctaaccagagttttattttgtaagtgtgttatgttttatgtgttgcacatgagcacgtccttgatcgaagtatttaaaatttgttattaaagaaatgtgtaaatttatagggatgataagtgattgtgattgagattggtcatgacgaggaacatacgtaattgacgtcgtatttgtgttaagcttgcatcatgaagtgaagtacgtcgacgttattaataattatgatcatttagtactacttacgtactattgtaccctaactgccatttcatttgtcttttaacatttttacctaagtgacggtcatgtgaattgtctagtagactagtactgactcctcttttggctttctctatagacaaccttgaatttaattttaatttatgttaattacgtcttcattatcaaaccaaaaacttagaagatttctaagttttgtggagacttgcaattagggctcagctggtcatgttgttagagcgacataaaatgagatgaattttattagtttgttggattctacaaagatattggactacctaccatttgcattgaaaagaatatcccaaaagagacttttggttttactttagggatctctttttattttattttatttttttataaagaagagagtattgggaaatctttaaaggcccaaaccaaagctcagccatatttctacagttaagcccagccatttttttaccaaagaatgctaatatcatttttcagcaagattttattgaatcattcaactctctaattattgattagtcgcggtattaaaattgtgcttccccttttggaaaaaaatagagtaactgttcaaatccttatcatcctgattcaggatattaaaccttaaatattgtttgtcaaactcaacttctatcaatcattttttatattgttttaatgttaaacaactgtccatctatcttatcaacaagaagaagaatttctagccagacttataaacttgcacgacaagacattcatccttttttaattaatgaacaagagtaacgacttttacacttctcttgtcacaaaattattgaacagtatttacaagtattttataaaaattgctattggttgatatttttattggtgcatgtcaagatatttctggcaacaatcattagaacgcgaccataacatgtgctgcaatttgacaattctttatatctaaaaaatgacaatttgacctcgttggaatcttggatttgtttctcccaagcacaatatgttcgagctatcgtaccatttctgaaagtgtaattataaagactgcaatcatatatgggctcgtggagctaaatcatggcctaaagtttttttttaatcaaatggattttgaacttgtggtaaagttttcggatctacgaaaaattatgcattcttaatcaaacctctaattcgataagacaattgttttccaacaaagaatgtgtcaaaactcaaaaactcttaacaattgttttgaatgttttccaataataccacatcggtttatgtatcaattaatattccaaaagttgatactcccaacgatattcctatgacctagaatttgatccatatctcaaaattttacgaccgacaaatatattaatgttcttttattttattttatatagattaatggtttagtcatctacatgtattcattaatacacctatatactgtaatattttcacgaaacttttaaacatttacaaaaaatgaagagattaactttgaaacggaagagtgttaattacttaattatgtatgttttgtttgtttgtcaacgaagagtattatttttttatatactaatatgaagacaaaacatataattccatgtcacctcgtaatctcgtatgttgtaaaaaaaatatctctatccaatagtatttcactacctagtttaaatcgcattctctataatacgttaccatattccccaaattacccttagctatgaccatagtcgctggctcgctgcaaaaagtgaaaggggtatataggtaaaaaaggataaattaacagagagaggaagggctttggcgtggaagctcagcttttctccgagtcgggaaaatgtctttttctcgaaagaataaatctttttctcttctctctgtgttaccctcttgaaattttccgcgaaaaatctcaacttttccatctgaaaaccccccaaaatcaaacaattggatcttgatttttagctgtgatttagtgattaagaggcttagggtttgtggcgaaatgttggtacagagaagagtaatgagttggagaagagtctggaagtcgtttcaagcggcttctgcgcattgtttactcttctccttcacgcttcttctcgctttgaagcttgatcatgttgtttctcattcatggtggtcagtttttttcttcttcttcttaaagtttccgtctttggtggcttgacttctgttttgtattgtgaaatgtttgaattgatcgattggattctcaattatgcaaattctcttcttgtaaaattggatttttttttgtcttaaagttaaactctttcttaggtttatcactttgaatctttggtgatgtataaagtagaagtagtatcttcaataccatccttaaaggttaagactttgatgtggatagctttcactcttctttaagtatgtgttgttttgtctgtttttacaggtttgtatttgcacccttgtggttgtttcatgctgtgattgctcgtggtagattttcattgcctgctccatcaatgcctcatgatcgacatgtatggcatttttatgattctcttgtttcattttgaacctttgattctttgttgtgtttaagtcctaacttggtcttgtggcagtgggctccttttcactcggttatggcaacaccacttcttgttgcttttgagatccttctctgtgtacatcttgaagataaatatggtattttccatgacttctattcattgaatcacggcatgtatgattggtgggtttattataggctttggttgtgctcctctgtttgcagttgttgacttaaagattgtctttctaccgttgcttgcatttgaggtagcaattttgatagataatgtcaggtattccattcaaagcttttttgattttgttcacccttcttactactcttagagtacggaacaattaaatcttttttgcaactattcctgcagaatgtgcaggacgctcatgcctggagatgaagaaactatgagtgatgaagccatatgggaaacacttcctgtaatcaaagctcgacaagtttaaaatatgatcccttatatttctcttttaacttgtctctgcaggttgtctctgacattgtctaatggttttgtagcatttctgggtttccatatctatggttttcttcattgccgcaacaaccttcactcttcttaaattatgtggtatgttacgcttttacttaactatcttttttggagttagtgatcttctcccttccaactgcaatcttataggtgtcacttccatgtccttagttcaacttaaaagattaaaagaagaaaagtaattttaggttgttatgatatctggtgactgcatgttctaacagttagcgtgcgtgtgtgtgtgtaattttgtaaaatcgactgcatactcataactgttgttctgcttcataatctctctatctcaatctgtttctgaatctgttatctttcgagtccttatataggtgacgtagctgcgttgggatggtgggacttatttataaacttcgggtaaactactttttctctttaagatcttctgcctcttaaaaatgtcttctgtgccaggtttgaacaatcttctttctcctcaattcacagaatagcagagtgctttgcgtttcttgtctgtacaaagtggagcaatcagtcaattcataggtattcacatataccggaacctagctcatcttcaatggtagtaagatatctggattggaacagaggtctagtagtaaccgctgacgacgagcatcagcaaagcaacagaatatgtggtctccaagatattggtggacatgttatgaaaattccatttgtgacctttcaaatcatccttttcatgcgcttagaggtacaacacagacaaatccattgcttttgaaacatttacgaattccctggttggagctaattctctttaatcttacttcagggaacgccagcttctgccaaaaacattccgattttagttctgtttgtacctctttttctgttacaaggagctggggtactttttgctatgtatagattggttgagaaatcagtcttattaataaatagtggtagtggttcttatggaagatattttaccgcaacatcatcagctcgtgaattcctgggattctttcaacatggtgcaaggtacgttagcagaaacgaactatacataggaatctatggggaataagtcctcctaagtactaatctttctcatattgtaaatcacagattacttggctggtggtctatcgatgaaggaagtcgggaagaacaagcaaggctctactctggagaagctactgggtaaagctctcatcttttgctaacaagtcgtcaatttggctctgttaacaacaattttgtttgactcagatacaacaccttctcaccagaggttgtgaagaaaatgccaaagtctgatcttgttgaagaggtaagttacacataagtcatttcctttttaatatctgaaaccaaagcaaaatctttaatctttaaatccctcaccagatatggagacttcaagctgcattgagtgagcaaacagatatcaccagttatagccagcaagagtacgaaaggcttcaaaacgtactccctccactcattttctctgtttagtaacctccacagaagtaacgatttgcttaacccaataaattacaaaattttgaatttcaggagaagattctttgtagagtttgctttgaagatccgatcaacgtggttctactcccatgtagacatcacgtcctctgcaggtaaaccgaagctccttctttgttctctatctcactttaaccgcatagtagaattagcatttggctataattgatattttactgatacatttggttttcagtacatgctgcgagaaatgcaagaaatgtccgatttgtcgtgtcctgatcgaggagcgtatgcctgtatacgatgtgtagatttcagagctccaatccagaaatgaagaatacatttcttgcttgtttggttttgttttagtaatgaagcaagcactatatatatatatgttacaacttgcataggaaaaattctgattcgttttcgagtggatgtaaataatactgtaaaccatcgtatatgtcatgaatcttctttctctctttttttttttttgatcatacaatttgcaaagattcatacaagtggtaacggttaagaaataaaacatattactgttaaaggattttgaatcgaggttaggcagtgagcatccaaaaaagcttttctgttctctgcatgtttaaaggaacaagggaatgatcaactaagaatatggccacaaaccgatgagattgatcaacagattgggtatttgatcaaagttacatattgggcctcaactatgtatttctaatgtgattctaacatggttcttctttttggtatgtttgggctgttagccgaatgtgacttaaaaggctttgtaacaatttatttctcatgcatttaatagaaaaatcaattataaaaaaacaatatcaaaacaaattttgtgttttaaaagatctctaaactcttattttctggtatttttgtctatagtccgccgcatttttatataaaaagagttggtgataatgtaattgatttttgttattattctgttgtgaattaaactcattttgacaaaaaagaattagaattgtacctttataaatggtgaagaaaatatgatggatcatgcatgttatttattctatttcttctcaatatattttgatagtaaaaaaattagaattgtacctttataaattgtttggtgtgaactgtgaaggtcattatatcggaagcaaaattaaagaaacttaatcagcaataaacagcaaaagatatcgattaataagttacaaatatacatctgaaaaaaccttctttgggatgaaaaatctactacaaaaaaggaatacatatatagctccgtttagaagccaatacatataaaagctttcttcccaagggttggttataagtaagacccgcaacaaaaaaagaggaaaaaggaagaaaatctttggttagtcttcattaagctgatgatgatgatgttgataatgatttgattttagtcatgccaacaaagaagcatgacaacacacctccttatgatgtaaagcttagccttttgctctctaaccactcctcccactccacggctccacatcttcctctttgttcctcctacactcgaaccggtcgtcttcattttctctataacgatcacaaatcaagaatgtgtaatttgttttggaactgaatgtgaaagagagagatataaatgatgttatggagtatgaagaaggtgatacatgaagaggagttatatatagaagtgagaaaaaggtggtggctaaggacagaaaccgaaccgtaccgaactagaccggtccatgaaagaggcaacgagtgggtccgttggggtttgtgcactgttccctaacccaccggacactgtgcccctccatacccacgtggaccccatcttttgaaggaatctttgccctaaatgtgattatttatcctctatcacatgcttttgcttctctctcttcatgaaaacattaaccaaacccaaaattgttaaagtcggatccactcaattaccattttctgtaaccaatgaatactataccgaattcgattggtttagtctttcatataatggattttgtctaaaatcttaagtgtatcagtctttgatatggttttgtctaaaatcctaagtgtataccaacccgtattcgaagttagcaaaagatgtgaccaaccaaaattgtcgggaactactatactaaccatccaaaatcgacaagtggcctggtccccgcaacatattgtaaatcatatttgagatttaatgatgattgcgattgataataataactaatgaagaataacattaaattcctttaattaatagacataggttaaatagttgttgcgacttgtgagctagtgatatttccatagcgaccaattgtagtttagaagtaatatatacactagtaaaatctggtagccacatggagaaatattcaaaggatcgaattttatgtttagtctatttcagtcagatataaattattggtagacaaattgtatgaagttctgtagagtataaaaatgcattgcgccgaaattggtgatagaaacaattaaacaaacgtcaataacagtattaaagaccaaactatataactaaatgtgggacagttaggcgttaattaggtggcataatcctaagttctagattcttctaaatataataagtgagattgtatcaatcttttaccaaaaacccgacaaatagttggtatgatttgagaagtaaatcatcttcttctttttttcaattcacattaatcgttaacaactcaaaacaaagggtattaaaattagcactggaagatcttatcctacagctatatcacagcttcatagttaacgttaagattgaagttaattaaataattagctacacaaataaccaagtagagctaggtgtggtttgatgtggtttactggctgttgtcattggttaaagtgaagtcctcgaatatggagagtggaaccgcacgtgaggttctcgtgattcacaaaatgcctttagcttttggtcgtctaaaagaacaagttttagaaaatactaaaagttacacttatcttttttaatctatggttaagtatgtgagttggtctctgtcattcttctttctttgaaatcttgtcgtccttttatgaaccaactttttcttcacctctagtggttgtgaccaatttaaacaaattaattagtatttgcgtttctgtgtacgtaattaataaaaagttacgtacgtgtgctttgtgcgatggataaacgtgagagtgatcattataccttttagatccaacaaagctcaaacaactacattcatgaatgatatacaaaaaaaaaaaactacattcatgaatgatatatataccatttttatacggtttcataacgtgaaaaaatgattctcatatacaccttttcatcgtcatcaattcttatataattttgaaaaatgattccactagttggtggtatgccaaaaaaacagaactagaagaaaaaattaaaccactttctgttaacgttttacgactattcaactagaagctattcgaccattgaactatctattctgctatattaattcgaagccctactccaaaaaatgttagatgctattgttatattgggttataatataaaatctgctaaaagcaagccataaaattatgtattagagtattaaatgcatgtgctctgagtgaaaaaaaaaaaaggttgagttagagaaacgactccagcttcaatggcgtacgaacggaatttgtttagacaaattaaaatagacaattacttacctcgagagccagcaagctatattgcttgaccagagacttctctgactcttcgtgcgtagctcatggtttttcacttctcaggtccgaagcccgaaagggtaacgtgctgttcaagataccttctttctgtttttgtttttttaattgagggtttcacaaattcctaggacataaacaagtattcacaaagttatgaaacttcagaaacagagtcagagactcccaagtttgtggatttaggtacaatacatctttttctttaagattacttgattttacaagtagtagaaattttactaagggctaataagatatacattgagatttacactatcgaaaccgaaatgaaaaatgatatattgtaagtagagtctgtcctcactcctctctggggatccatcggttccaccaaacggtcttgcggccatcgctaatctcatctatggtctcagtgactgttttcacaagcttcctctgaagcctaagtgctgatgcaagagcatttctttgcgcattcgctttctttcgaggctctttctcctataatattacaaaaagagaaacaatggttaaggcttgaggaggtactcgaagaaaatgaaaagagtatagattgacaacgaaccctgagttcttggagttgtgtttctgtgaatccaccatctttttctgtcccattttttgccattaactgtattacccaatttgctgcttcactgtagtcctgttgtgtagccctgaagtattgcattctcaagttttgcatgacggacaacgcgagcaatccttgtctatcgaaatatgggtgagcaagagctgcttttgcgctgattctttgtcttgctttgtaccggaccatcgatgttagaagttcccatccgattccaccgtctagatctacaagctcgaaccctctacggagatcagcgcttgcacgaggctccactagttttctccaagctgttaagtcatagtcacatcttttcagctggcggttgaactgaatgaggttgctgtcagatcgtaaggatgggaatgcctggaatggtaaagcatgatgagaatattaacagatagtatgtatgatggattcgttttccatcacaaggaagctgataagaacgaaactggtttctgctctgataatcgaagaagggatgataaaaaacaagaacaatcaaaacaacagaaccaaaagtaatccagggcaatgaattctagagcattccctactctcccaaggctcaaactaacacccctagaaacctgaaagagctcctattttactctaatcctagtcactgactgatgaacgcatttttaacattaattgacacaaccagaacacacggactatgggcttgtcaaaagatagttgaacatgcgtgagtcgaaaatccagagaaaactaaagccaattggtgaatcgctgcttaccatttgaaggaagatgaggccaatgctatagatatcgaacctatctggcaaattcatctgtttggacaaaacaataagtatcaaattccaacacttaagtttatgaaactaggatagctttatatcaactaaggtcgcatagtcaaacaattaagtttgcacctgccacaggacaggggaaagtgcagctgcaacaggtgctgaaggtgcagatggagtttgggtgctcatgatgtattgctcaggtgctgcatacctgaaagcaacaacccgaaaagaaagatacttattaacggagaaacgtgaagtttacaacaacagaaagttcacatttatgatccttgccagagaaagatacaaattttgaaaagaaaaagaccttggatcaaggagaaactcttttggaatgtagttaattcccactctcaaatcagctgcagctccaagatcgataatcttgaaagaacgagaacctgctcaagttttagtcgacacaaaacatgagtcctcatcttttcattgggttcattgctcaaaaaggttcaagaactcagatgattttaccttctgagaaaataatgttctgaggcttaacatccctatggataatcccagttgagtgaagaccatccaatgcaaacaagagttgtctcatgatagtctgaataattttgttttctcgttccaaccctttaggcaagtcttgaactttcccaaggatgatagtttctacctatatcatcaccttagaatgtgacaaaacatataacataactacaaaaggataaataaccatgaagaatcacatacattataaggaaattctttactctgcatcaaaccagcaagtgttgattctccttcatatttccataacagccaatactcaggtcccttctttgaagacttctataccaatctcaacaaacaccaaaatcataaatcaaggaagtcgaaggaaaacatcatttcagaggaagagaaattacatcgagaaatccataaacaaaatcagcacagctattcccacaagctcttcgaaccctctcgttcatccaaatctccaccgcaccatactcagtcgccttcttcaatacatactcaccctcctatcaacaaagaccatgataaggttcaatataggatagtgaaactctataaacaatttgatcaaagcttttatttttacctcattagaacgttttttagataatgagactttataaacaacaccaaaagaaccttcccctaatttcttcccaacaacaaaatcatcctacacaaaaaccaaaacctaatcccatcaaaatcaaccaaaccaagagacaaaacccaaaaacaatcctcaaatcatcataaaaatcaaacctttctaaaagtaggtcgaaacaatctctcaacaaaagcaagaacaaacatatcgaaaaacccaggagcaacaccaggtgttgcccatagatacgaaagagcagtgagagctaaagctactccaggagcagtgatcgttaaaccattagatttcggcaaagtacttcgatatatcatatcaccacactccataaccgtacatggaagtccaactccaactccgatgaagagattgtgaaccgtatcgatcaattgagcgcgacaactggaattgagcttaaccgttggtttaaaactcaaaatcggtgaagttagagagaaaggtttgagttttttgccgagaaacggtgagggagttccgatgtaagctcctcccggagatattgtagccatggcggaatttttttcaccggaagaattttgttggaagacaaaaaatcaaaattccttaaacagtcgttgatttcgcaccactagtttttttttttttttttttctgttcattcaaattaattagtagatttacaccacaaaggacacgtcgattaaaatcagattcggatatgtaaggtttaataaacgggcttatttttaggcccattaatgatgaagtgcttattaaatgggcttctcatgttgttttagtgataagatccataaatctaattcttcgccacccgatcataaactctggtttagaaaagtccccatcaattatcgatttgaagctaagtaagactcggctaatcttaagtttaaatttaaatttgtttttctttcagtcttcctaaaatgtatttacgtcaattgatgtgtatcacaaaatctcacatttttaaatatatgatattatatggtataccattaagccattgaaataatagaaatcaactttcttgatgaagtgttttgaccatttccgtacaactattatatgacaacgatttggcaaatttgtttacttcgttgacctcgatgtacgtaagctaattgacttcataatcctgtttgcgagatagttaattatattttccctttcataattgtatattatatgaaattggtgcttttaaactcttaactaacatgctactccctatcaaagtaatactatatactatcattctacaataatgactgtagtaaagtttgtcacgcaattgaccgacgcatttataaatatttcttgccaacatttaaggccaaaacttgatggttcgttatgaatcgatataacaaatcactgtttgacatagaaaaaacaaatactatcaaatgttagacaaatgttatatatagtccatatatataattactttcattacttgtatactttctactagttttgttgatgttatgatactcgtttcgaataatcaagcggatattcaaagatttaatgcagctatctgatcttcttaagatataagaattttttttgacaaacatatatttgatcactatttggtgaattgacaatttgtatttgctttactaattacgaaattcttttattttgaagcgggtcgtacatcgacgaatgacataacggataaataacagatgagaaatattattcccaccgatgacaagttatacaatgaatccataacgtgtatactgataaaaatatttgtattagcactggaaaagaaatgtgaaaagaatcgtaagaacattgaccataatgtacgcgcaacatatacagcttgtctgtatcgacgtggatacgtgatcaaaagatacagtcaaatatattctcatttgcctcacatgatattatcatagtactaatcactacattaagtcacgaattagctaaactaatcaatgataattttattttcagttagttttatttatttgttgttttgctcggctttatgaacagaacatcaagttggacaaagtcgcttcatttccagatagtcacttttttttttttttttttttttttcagatagtcacttttacataaagtattgatttgataaactttcaagtttatttagttttgagtaaatctaacaaatgcaaattagattatttgattcagcaacatgaaaaaaaaaattagcttatcgtctaatatttttacataaattcattgttgacaatattataagtgagatcatttatatatattgtaaacggaaacaataatatacttatgtgtaaacattacttagtgaggtcatggaaactcgctaacgagtggctgctgcaatttacaaaagtttgatgtgtataatatttaattagtcgcacgctagttaatatttaagttttcttcttttcacttttgtatccaattatatagtatgtaggagccacaaaattgaatctattagttaaattaagttggttctggtggtataatcatttaattaagttagttctggtggtccaaaactaggccacgagtttcattattccaccagaattatataatttagttagtcaagtctgattagccgaagatggaaatacgaaaaaatgtcaataatacatgaagtctttgtcttcttaccaaaactgtacgatctcaacgatggaagataagaatctaaaaccaacgagtgagatggaatcggaatattactaaaattaggatgagatgaggtttgggtccatacttaacagtgacaaatgacaatgatggagctgactttttcgttcttaaaacgtatcacaagttttctcctactttaaatttcatctccaaattgttgaccaaacgacatcgtctgttgcgacaccttaccccgatgttttttcctacgttgcatggaccttttcttatactttcaaataattatttgtctttttttctcaacatttatatccacattttaacgattttctcaggatattttctatcaatatgcttaattttctttctttttttgttaaagaaattaattcccatagttaacatgagagggtttagcaaaatatgcttaattttcttgttcgctgatgtttttatttttatttattattactgattcagcattcaaacttatcatgtgatttggatggttattgaagtttcatattaattgataaattaaatgtgttgggatgatgagaggtgatatagaaatacatattgtagtgtttaaatagatatggattcaagtatataattaattcttcttaatcaaattaatttgagttggactagtagtctagtaagtagtaagagaacatattcggatggtatcttaaatttatgaaatacagtgtgttttcagtttttattggtagcaacaaatttatcggttcatacctcaaagatagtattatacgtgtctacgattatataaaaaaatcaatacaaaataattgttcattcaagaaacaatcggacgatatgaacattatagttacaaactagtaaaaagctataaatatgtaaagtgaaaactatttaaaagggtgaaaattaaaacgtatcaacgttggagtgtttcaaaaatatttggttggataagctcaaactagtcaaattgtctcccctcccaagcgggaacatcacgccatgtccacaataaatccatttttctttctctcaaatatatatagagatacatacatcgatactattctatatattatgtaacaaattagaaatatcatataccacatggtaagttgtataaagagaattattagtgtttgcttattgcaaaattaatacaaaacattttctattgaagagctacaaattaagaaggaaactgaaaaatataataaaaagcagaatatgttacgatatttgtatgagtgtatgagacaacagtatcagataagatcataatccttgcgaccaacctatccaaaagtctcttttttgttttctaatcaatttacaaaacatttaaccaataaaaatataaagatggtgaaaaaaatatggtcatacaacaattgcttcaaagggggatgaactaaaatataccaaaaaaagaagtgaggataggttcatgtgagcccccatcccacttgaccctcttggtaggtccacatttaccatgaacatgtaacccattggttattcatttgtatgtattgttttttgtcaatgacttaattttattttattttcttcttctctgacttttttttgtttatctgactcttctatgtatgtcaaaatgtagcaagataattgaacatatttggattgttgaaaaacatatcgatatttagtgaattagtttctcctccaagcatctagaatgtcataactgtgttgaattgtacataaaatttgatatggattgatcattgataataaatcaatgaattaatgatctattagaatatgaacttttcattcaaatttaattgataataagtggatttgtctatatgtaatattttagtcaaaaaaattgtttcttttcaatgcgatattattatccttaaaacgttttctcgagataatttttttccgagccattaattttagtatgttcagatatagatcgacagaaaaactataattacgtcggaccaattgtagattggattgaatacatatggatcagattctaataccatattagaatatgaggtatctaattcaaaaccaactattaataaatagattgactcatatatgtcttatatactagtcaagatttctttgtcttttctaatgtgggatattattatccctaatatcatgaataaaatcaagagttaatgtttaactatatctaatctatactacccatcttttttcggaaactatatataagttataaaaccaagaaattctcgttatccaataaaaataataattttgactatggttatatatcagtttcaacaacttatatgatgattgatgagaaccttattttatgaaagtacgtggtaatgtgttgtaagaaaatgttcttacgccgttgaaatatttttccaaaaaatgtacataacaaacgtacgatatgtatgtaaaagccgtggtactacatttatttttgtctgcccttctcggaaacttccttcaaagttatttttgccgttcttgaaagcgttgaccctacctttccatttttaaaatgttctctcattttgacccatttttttccataaaccaatcaaattttaactttcaaaaacataaaactaattagatataaaataataacatgtacatgcacttgcctcgtccattcctcacatcatcatatgtctttgtatatatatagatgaaccaaagaaatgaaaaagtaacaacgtcacctaaatctctctcacccaatttgtgtttcttctttctgctaaaaggttataatttttgtttcttggtttggtgagaatcttcaagaaactgaaacaaagaaaatggattctagttgcatagacgagataagttcctccacttcagaatctttctccgccaccaccgccaagaagctctctcctcctcccgcggcggcgttacgcctctaccggatgggaagcggcgggagcagcgtcgtgttggatcccgagaacggcctagagacggagtcacgaaagctaccatcttcaaaatacaaaggtgttgttcctcagcctaacggaagatggggagctcagatctacgagaagcaccaacgagtatggctcgggactttcaacgagcaagaagaagctgctcgttcctacgacatcgcagcttgtagattccgtggccgcgacgccgtcgtcaacttcaagaacgttctggaagacggcgatttagcttttcttgaagctcactcaaaggccgagatcgtcgacatgttgagaaaacacacttacgccgacgagcttgaacagaacaataaacggcagttgtttctctccgtcgacgctaacggaaaacgtaacggatcgagtactactcaaaacgacaaagttttaaagacgcgtgaagttcttttcgagaaggctgttacacctagcgacgttgggaagctaaaccgtctcgtgatacctaaacaacacgccgagaaacactttccgttaccgtcaccgtcaccggcagtgactaaaggagttttgatcaacttcgaagacgttaacggtaaagtgtggaggttccgttactcatactggaacagtagtcaaagttacgtgttgaccaagggatggagtcgattcgtcaaggagaagaatcttcgagccggtgatgttgttactttcgagagatcgaccggactagagcggcagttatatattgattggaaagttcggtctggtccgagagaaaacccggttcaggtggtggttcggcttttcggagttgatatctttaatgtgaccaccgtgaagccaaacgacgtcgtggccgtttgcggtggaaagagatctcgagatgttgatgatatgtttgcgttacggtgttccaagaagcaggcgataatcaatgctttgtgacatatttccttttccgattttatgctttcgttttttaattttttttttttgtcaagttgtgtaggttgtgattcatgctaggttgtatttaggaaaagagataagaccaaaaaataaattggaacaatggttttgtggaaaagtggtaaatagacctacctcatagtaaaacgttaccggatacaacctaaatgtttatccgttcctaaaactagatgaatcaaattaattaactatctaaaattgcatgataaatcggaaaaagaggatgaattcttggcaatttcatccattaccgtacaaggacttatttctcttacttggcaactaaaggatgctcataggtgtcttaatgatctcacatagcaagttagcaaccttttactctctttttttccaagattactctactctaggtgttgcttctgtaattcctttattttcatttctaatgatatttacaagttttgcaaaaaaaaaaaaaaaaaaaagttagcaaccttggagtctcgaccaatcttgaggggaggatatggcatgaatgatgtaattgtagagtcattctcgaaattcaccacttcatagcccacattgtcaaggcaccattcaagcttacaaattagcagtagtctgcctcttatcgtctcgaagttttctggtattggtataagctaggtttcgttccccaaaggtcgaaccattaataaatgactgaaatcttttaacctcaaaacagaaatatgtaaactgaacgaaatccaaaatatagtaatgtgttcccgaacagattcaagcgacttatagtgcttctggcaaacctcacacgactaggctggtgaacggaatggtacgtaaccattgctagaggttgtatggcttcagtttgttcagttcaagtacaagaatcttggggatttttgtgaacattgcggtatgattagccatcggaagtgtgaaaaagtcgcaaaacagagatgtttgacccgcgcgggtttaaaacgatacgattctcaacgggttggtaagggtttatccgtgaagtctcactactcccagtcgtatgttgacatgggtttactgttcgaggagacacttacttacgctcagttcatggtagaggttagggttgatgttgtttacgcaagcgagcatgagtggggcggcaagaaactgattcgttccttgttggtaagtaagtatgattattgcttcgggtttccttgtttcccgacacgattcattaatgatgttttaccatttgaagagataagatctcacatctggcgaggttgacgaccgaggacaaggccagcatcgtccgtggactagcagatcacttaatgaagcagaggaggacttggtcaaagcagagatgggttcctctgttgttcatgtcgagaaaaaaggaatggtactgataaatttgatgagggtaagaacacaaaggtgtttaggaaaaattataatagactctgatatgaataattgtacaagatacattctcttatatagagatgaaagcgtcgattatctagtgagggttattagaggtgtgatgaatgagttcggttttactcacttcccggattcttatattaatcgtttggtgacatgggtgaaaaactccaactacttttcaccaaattttccaaaagattgcatcctgataacaaatgtgtggcagtgcttggccctgacatggatttgtttggcacatgttgtatatgtcaagaagatttctttcttgggatggaagcaaccgttacttcttcttgttctcatgttttccatactttctgcattgaagactggatgcaacaatctcaaaattgtccactttgtcgtatcctgcttccagtatcaagtaggtgagatcgagtcttgacgtctttagcctgtttccatgctaaattcttagaaactctatcttttacatgagcagaattttgctttgcttgtctctttatcaaccttaaatttcattatacattttttgaaaagaattatttcttctttcgaacttacaatattggagtttgagtttttgcatatatagtgcaattattttattgattttgttgcatgcacaaccataaatataaagtcaaaccaaaaaaacaactacagactcagatcaattgaaaatcattagaataaggttttaaacattcaagaaccctatagttttaaaaatgtagaaataaataagggaaagaataacatcaaattaaattttttctttcttatataaataaagatcagaaatagattattttctccattttttagtttcgttgttgatgaatcatgtattcacaaatctgcaatttcttctaacttctccatcagccaagctttcagagttcaaaatgttccccatctttaccatcgacttcgagaattgctcgaagaaagccactggatcctccgcatacttgctcacgattcgccgcgtttgtatcccgaacaagctcgtgtacatctcctggtccgaattcagtaacccttctcctcttagcagtgtgtggtagatcgagttatcgaagagattcggcgtcacattgtctatcgccgtcacgttactatcaccttctccgctactcgccggacaaatctctcgaagacttgccaagtacgtctccgaaactggatttagggctgacgtcacttgaaaatctccataaattcgggatcggaagttgcgacattgtgcttttccgatcgtgtgcgctcctaggagatagattattggtcaagttagggttttagtaatccggtttacgacattttatatcatattatattcaatcatatggttttaacttctattacaaggaatttcggtttagtttggttaagaggattgatcttacctataagagcgaccatgtcttcaaccgagagaccttgagaatagaacttagcaatgatgctgattaaaccctcttctggagttggaaggtttgttgtggcaagctcgtagcttgcggtttttgaatcttttcttcccacaggaacatcccagtaaggcccacccaccttcaaacacaaacacaaaatcaaaattttatttcatttcataattcatacgatacttacaatatacagtatttatattgagatttgagagagtatatgtttcgtttgtgtatatcttaccaggattgtagcatctctagcaccaattgtgagaagatcagcgcatgaaacaactccaggacattcggattcgattatgttcttgattctgtcgacaattttgtatcctttcaatgaatttatgttgggagaagctttcttctctccctgtagagtttctgtctcgtctagcaacaccgatccatcacatccctgtaagtatttgatagcagtaaaagtttgacatatcagttatgaattttctctggcggatgatgtcttgtgtttcaagaaaggtgtggatgtgtacttacttggacaaagcagtcgtggaagtgaagacgaataattatggctgcatttctaggatcttccttcactatgcattccatttctttcttgatgacgtcaaatacggttggacaagtagacttgtaataatctagggttaaaggaagatccttccccggtgtatcaaaggaaaagcatgggataaagatggtgtgaaccatgaagaatacaaagaggagtctcatcatatttaatttcttctatcggaaaactttttgatccaaattttgggaaaatatgtgtgttgagataggagttagagaagatggttgagacttcccagagatatataattttttgagaagagggcattgtagagtttttagttttcttgtgttacaagggtcttgagaagtaggtcaagtgagatgcaactaattttgtgagatggttgttgggttctcctatgacccaaaggtaactagatgaaaatttatttgaattctagtgcagattattaccaacccaaattattatattaccataaaagtgtactattttttccgattcatattccacttttgttattaaggcagatatatttgtttgtatgtttgcaaaagttgcaagcacatcaaaactgattcttgaaacaaatctagaattctcgttcttttgtaattcgttcaactgttttgttctgctccggaactatctacttctcttttttttgttcacctaagaaatatttagtgtttttttcggataaaaaagaatacatataatgtagttccagaaatgaatttgcatagtctcaataggatttgaactatgttgttgacacgaccatggcaactacaaagtacaaatccttgtccatattatttcatgcatgttagataaatcaactaaacttctttttcaatgtttccgtagttagtttggaactaaatctgtctattgttaagaataatatcatgagtaattagtgagatatataggtcgcaaataggttcccaactctttttgagttatttaagtcgagctttataaattttattaaatactctcaacctcgtaaactttgtgtaggtgtagcgggagcttaattatatcatttccttggaaataattttgctaagtgttcttctctttctctgttctttcttcctatgacgaaaaatctagatgaaaaagtaggagggaaaataagatccactctttggcggcatcttgaattatacgattacataaaaaaatgaaagtccaatatttattaaaatagtaacaacgcgatcttcgctaaaatttgaattatttatttgtcgtcaacttgttattattttaagaatattttcagtcttaaaaacggttaaaaacaaggttatatattggcagggctacatgcattagttgaaaaaaactagtgttaggtggttttggtataatggtagaggattgtgttgacctcttagatttgaacctgacttatgcaccttaatagagttttttaaactaataacatctccaagcctcgagaatgtgcaactgtgcaatcacaagtttgaaaatagtattattagaagaaaacaagtcattgcaaaatggcccattagctcagttggttagagcgtcgtgctaataacgcgaaggtcgcaggttcgaaacctgcatgggccatttactttctactttttttgaatatattgcttgggaaagacacacactcagtaaaaaacgaatgaggattgtgctttcgagatgttgacacacatttgggatttggctgatgcatagtcgcaggagtgattcgaagaaaaaacaaatcatcgaagtctcaaaatttagatgtaacctttgaagttgtaatattacaaatatatcattcgtttacatcaaaataccatctacatgatgtcaatgtgcaccataaacacaaacttcagtgactttaatggtcttgtgacacgactcttgtcatgcaagacctgcaagttaaaaagttaagtacacattaaatccgactgaatctaatctatgtagtatgtactctaaagagagtcgaccataattgacttgacgtttatgaacttatattttgaaggaaaatgtctttccacatacaagatttactgtcttacacttatatatatgcataaaagtttatgattgctaatttgctatgttagaaggttaggaacaaaattgtaaaataaatgctagaaaatacaaaacagtaacagcagagaattctgcaaccaataaaatgtattcaattattgaaactttttggaaaccaaaaaaaaagtgggacgagaaatctaatcgaaaggtatgatgttacagcagagattttttgtcatcttatctaagatggaaaccaaatcatgaaaaaaggctttaacaagtatagtggtgtgtctaatttaaatgagagaagtttccaaactaatatacacatatagatacattctatataataatttcacatcacatgggtgacttatgaagtaagagacaaatgaatacatggggaagtatacctgacaaaatcaggctcattcaaagtaaagctaaaagtttggtgctataagaaacatccccaccttttttaacctttcaacaaaaccacctaagcacttcttattaagctctaataagttctttgaccccattttctaacaacataagtaatattcgagtgaaagagaagtgaatccatgttctctttcttctcaactattctcacccacctaagtgtaagctaatccaattactaatcaaaacaaaagatattattatagagaaacagtactcacacgtgtaggatgaatggtagtacaaagacccacatgagaaaatccaaagagagtccctaaaagaaaacaaagcttggaggcattaacgatgtgtacaattctaataaatcctaatatatctccattcatgagacccacaatgagtattattatttgtactatgaggatcaaatttcataaaggccaaaaactgatttaacttaaatgctcaaaagaggggtcaaactcttcttacaccttcaccgtttttaatgttatatggtttcatttctcccacacttgctttgcttagctgttacttaccaagatggactccacaatcactgtaaaaaaaaaggtgaagccattcatagaaacaatttagttctttacttttttcaccacagttgatactaatctctgttttgtcatattcctcaagaatagaagtaaatgcaccaaataaaaacaaataaaatccagttgcgttaccttcaatgcaaaagaaaacaactattttatgggagagagaggagagaggaacaaaaggctgcaacactttttatgaccaagacaggactgggagggaagaagagtattaaaggaatgaggaagaggaacagctcctaacctaattaagaaaattggtttcatattccttcttgtttgttgagtgggtcttatctcatttccacctcaaaagctgctcttttatagttgtgagattcattatagctcagtaaaacagagagacaggagagagagaagtaaaaactagtaaatgaaatgttgtagctatcctcctatcatatggctatcatcaataaaaagaaaaacaaaaagacaagtgttaaccaataagcattgtttacacatcacttatgatagctcaaacagataagctttggtttggtgggtattgaaccgtgttttgggaactataatatgctcaattccctatatatctataaaagaaagtggtaaaagagaatttataaggctttaaattttattatagaagagtactatttttatttgaagaaggaactaacctttctctccttgatatatatctgaaatggcttgtcttgtagtacttcaattgagcgaaaacaatggtgctaagattgccatgtggtgatactcactcctggtattcaattatatgagtgtgattccataggttccggcttttcctgatactgaaacacaagaaaggaaaatataaaatcagacaaaagaggacaagtatttattgatggtgaagagcagagccaaagacagcgagagagacacaggctatattagagaataagaggttggaacaagctgaggtacgtaacgttaagaaagaaagaaaaagaagctaagttcacttttgtgttagccatggagtctccaagaattcatggaggtgctgaggagaagagtagttgcgaatcaggatggaccatgtacatagaagacacctttcatggaaaccaccactctgaagttgtttatgaagaagaagatgatggtttctctgtaaaagaggtagatgatgatggtgatggtgatgaagatgatgatgatgacgatgatgatgatagtagtaacaatgaaagcgatgactcaatgacttctgatgcatcctcatggcctagcactcatcagcctccaaggagcaccaagaatcatgcagctgcaaagaatagtaatgccaaacaagtcaataatcagacagagaacagagttcgtgacagattcagcgatgaaggagaggaatctgagctcaaggctagaacaagaaccactgcagctagtcgtgtcaaggtgagcaaaaccaaataagactcatactggttttagtttctatatctatcaatgttctttcttgtctgcccaaggactttttttttttgtagctgatacagaattcagaccatgtagttgtttctaccttcatttgagatgtatgtgtaattgcattgctttctttaaaacaggattatgttttttgcttaatgcaaactccgttcatgtaacttatctgtgtggttttctgtttggagctatgctaataatatctaccttttacacatatactccgttctaacacaaacgggaaacatgtattccaatctgcatcttcatcaaaaagcaatcaagaaggtaatgccagaaaaaagattcaataattggaagccactgaaaaagcaacgtgtttacgaattactcatcattcaaacaaattcagattcaaacgattgaatttgggataaaacaaagaggctgatgacaaaacaggagtttctaaggttaccagattgttccataggtgtggccccaaagtagctaacacaccatagcttagcctattaacaaagactcatgctgctttcaatacctagactggccccctgaatctccagacaaccaatatcacttaaataagtgatagtcttaatactagtttttagactagtcattggagaacagatgattgatgtcttagggccggagaaacgcagacggcgtaccacacaggaaaagatcgcaattgttcagcagagctttgaaccggggatgacggtctccctcgttgcccggcaacatggtgtagcagccagccagttatttctctggcgtaagcaataccaggaaggaagtcttactgctgtcgccgccggagaacaggttgttcctgcctctgaacttgctgccgccatgaagcagattaaagaactccagcgcctgctcggcaagaaaacgatggaaaatgaactcctcaaagaagccgttgaatatggacgggcaaaaaagtggatagcgcacgcgcccttattgcccggggatggggagtaagcttagtcagccgttgtctccgggtgtcgcgtgcgcagttgcacgtcattctcagacgaaccgatgactggatggatggccgccgcagtcgtcacactgatgatacggatgtgcttctccgtatacaccatgttatcggagagctgccaacgtatggttatcgtcgggtatgggcgctgcttcgcagacaggcagaacttgatggtatgcctgcgatcaatgccaaacgtgtttaccggatcatgcgccagaatgcgctgttgcttgagcgaaaacctgctgtaccgccatcgaaacgggcacatacaggcagagtggccgtgaaagaaagcaatcagcgatggtgctctgacgggttcgagttctgctgtgataacggagagagactgcgtgtcacgttcgcgctggactgctgtgatcgtgaggcactgcactgggcggtcactaccggcggcttcaacagtgaaacagtacaggacgtcatgctgggagcggtggaacgccgcttcggcaacgatcttccgtcgtctccagtggagtggctgacggataatggttcatgctaccgggctaatgaaacacgccagttcgcccggatgttgggacttgaaccgaagaacacggcggtgcggagtccggagagtaacggaatagcagagagcttcgtgaaaacgataaagcgtgactacatcagtatcatgcccaaaccagacgggttaacggcagcaaagaaccttgcagaggcgttcgagcattataacgaatggcatccgcatagtgcgctgggttatcgctcgccacgggaatatctgcggcagcgggcttgtaatgggttaagtgataacagatgtctggaaatataggggcaaatccaataccttcacatgattcttttttctaaaagaacaaatttcaatcattcaagatatgtcattatcaactttcacaaaactttcataaattactatttcacaacaggaaaagagttagagaggatcttaacctgtttgtaatattcttctccacctttcaacgcagtgagaaccatgtagcttctttcacaacagtatatagaaatgtatctatcaaacaaacgaagagtcttagaaagtcaaagctggtaatttgtatcaataatacagttaagtgttcgaaaatgaccgaaaagttttagattattgaggcataatgaattgggagcagaaaacaacaaagagttttagctggcagcttgctaggagaggaccgcactcacgtagatgtgattctcaagtcactttccacattgtaatctcaaatccaccatgcacgtgcagaagcaataaacaggtaggtgataatgaaataagggtcgtccaatctaattctatgacccacaaaatgtgagagaatgtgactcagtaaatgcacaacacattggaccttgtctaccaatttcaaattccaggaagaccgaagaaacaaacgagtaaagacgaagaaacaaacgagttaaggcaaaaaaacaaacagttctgtgaaactattagctgcacatgctcaattgataatcgaaaacgaaatccaagggaaagattaagacgagtagcaatgctttcttgaaaacaaaaaaaacaacgatcactagtaaatctctcatattgtgtgaaaacaataccattaaaaagcaacactaaccttaaacctttcatcaaaaaatctgcatcttcgagaaactggtacaatcaattaacgaaactagaattccataatcataagagaagagttataaagcttaatcagtttattaaagtaaaagctgacataattacattagattcaggtaacgaggttaaagacagaaaactctaaattccacttgttaaaactaactgaagaacctagagatacaattctaaaaacttcaagaaagtttatcgaattaccaaacaatcctgaaacctaaaagaggaagaaagtggcagcagaatttaaccccttgttgtttctcctcattattcaaagttcaaactctctcttgtagaagaccaatggacttgttcatactctggagttaaagctcttgttccagtttggaatccagagctcaagctagctgaacctgaaaccacaaaacagattatctcaacaactattgatctaaaatgtttgaactgaaaactaaattaacctgaaaacaactcagtatgccaaactaacaatatcattaatcaactccctaaatacaataccacgtcaccctatctaccaaagacaaattctcattccattgcatgataccaaatttgtttttttttttttttttgaacaacaagcatgataccaaatttaacactgaaagcaatacgaaagaaagaactcatatttgatagaaagtgtttaccaatgcgcagactccagataatgttacgccggtggtgcaatgacttactcgatcatcgactgaatctgaatttggtattcatctccgtcgggtttccgcggcgggacacggcgtagatcgatgtaggggattggtctcgagaaatcggtgactaggcaaatagtgttatgggcttagtttgggctttaataaatgatgggttatctggtaataggcccttatttgaggaatccacgggttttcgggttttaccgacccggacgggatcaatatgtggtgtcatgataatgaaattacttgaagacaacaatatcctataaaacgttaccacgacacctttatttccaaaacaaatgctccttacattgcccagctttttctgctcttattcctgactaatgacaaaagcatgacaccagtttcacaactatatatatttgtgatctctctaagccttcaactatttaaaaccaaaagaagcaaaaatgacagaactcaaatggatatgtatttcattctcactaacactcttgctaagcttagcagttgaaggagcctttaacataaaccagaaatggtctggtggaagtcattttggttacgagggcgggttctgttttcccggtctctgcattggaggatctggtggtagtagagtccattatggcagggaccattacggtggtggaagtcaatatagaggtggtattggttacagagagaccatgtactgcaaaccgttgacttgttatggtggctcatgtgatgcactccatttgcatttagacaaagggttatatgaatctctcatacgcaatactaagacagcgaaacaatcgtcgactgttgatttcaacatgccagagactttgaaacacaatgtcatcaacaataactatgagtttaagatggcgaaagaagctgcaatggcaccacagtctaactagctagctaatgaagttgagtctttattgtatagtatgtatcaataaacgtaacggcctacgaatctcatcagactgagatggtatcacaagattatagttataaacttaattataatgtagaaaaggaaatcaaagcagtaatatatatgcttgttcaatagcaactatagtgagttacttcgtacatataaaaaaaaatagaaatagagagaagcttcagtctcctctgttattggcattcgcagtcttatgaaaacaaaattcacaattagcaagaagaaataatgtatattcactacaataaaaaaggtgttttcgtcacttatatatacttatataagtgacactctgaaattggtcatgcaaatatcattggaaaaaattggtcatgcatgcatgggcatgtaaataatgctacattagtaacgtgtaactttatatgtattgattcttgattacaatttttcacactacacattcctcgtacaagttaaactagtgaggccttggtgagagtttctcttctcctctcgatgtgctgaaagacaaagttaaacgttccatgaaacaatatagatatagactcaaatatttaattacttgtataaatatcgaatatcgtactattttatagaaagcaacgaagtcattgaccagttccggttttaacgtgactggatccatgtaaaaaggggttatacttataacttatacataaagcgaacgtctcttacgaatctatatatctccggtgagaagttaaagcggtggagatgggagttgcggctttgacgtggtggaagaaagcgacggagcagaggacagaggcaatgagagcaaagaatccaaatccgatcattagagagacaccggcgacgataagatccatcgccgtttgaatgctcattatgcccatcatcttcagattctttagttttagaaatggtttggataatggaactattataagagggtgaaacagaatggcatagcaattgcctttggaaatggtgaaacagaatgcattgccaccacgttacgtgataaactcaaatttacgacaccttgaactaattcttttaaaatacagaaatacaaaacaaaaccgaaactttttttatccaaattcgaactgaacctaaacttggactaaaccgaattaaaatttgcttttatttgatacttattttcaaaattcattgtactaaaccaaaaagcctaaaccaaactaaacagaaaaactgaatgtccatgccaaattattatggtcaaattattttatggtaatatcataataataaggatatagtttgtcaagctttgaataaaactaaatcaatttatgggagtatgataaattatttgacgacggtttttaaaactatagtgataaggatataattaatgttttggctttggataaaattgagtcagtttatgggaatgtgataaatgatttgactattgttttagaaattttacaatagtcgttgattgagccgaatctaaatatcgttagtagataaagacttgtcagattatatatgaacactttcttttggaaatatttggtttatagacccgtaacaagttcagacagggatcaagaacatttcgaaagagacaaagatgatgcatacatcgatatggacctgtttatttattagaacatgaaaatatatagtttttatttttttgtaaccaaaaagttttggaccataggtccgaaattcaaaacagagcaaagtcccctgaacacccccaatgacaaaattcgaacctgagatctaaagaacactctctttaggttatatttttggtaaaatatatttgattatattgttatagattcatttgagatgtttgtataccttggtcctcttctttaaataaacaacaaaaaaccaacaagcttacgagacgattagaaggtccagatctgatcggcctctacgctaagaaacctattaagcccgatctcaccaatcatcttcctcgacttggagttttcctctcgaagtttcatgttctcttctataaccttctcgtaacattccctggcttggcttagctcatcgactagagatttgttcttattgatgagttgaacaagcatggaccacagttcttccatgtgacgctgtttccgcatacgcgatctccgagctgactcgcggttcgataccttccttctccgcttcctctcattatcttctgcagtccggctagagtcgtctgacgtggcaggcaagtttgaaagtggtactcgatcaacaaagatttggaataaagactgtggattagggttttgacttggaaggttatagacagaaccagccatgaaaaaaacagttatgcgttctttaagaaaatttttgttgacaagtatgatggtatagatcaatgaaatgcactctaattttggtttttatagatgaataaatcgaaagtagtgttaccttacactaataactaatccaagtggctgaagcatacgtaaattttaataaaatagaaggagaagaaaaagagaagttctaatcgtgagattgatgagtcatgaagcacttgaaaggtgaaagtaagtagatggcatgaaggggaccattgcggagaaaatcaaagactatattataaattattcaaagaaagcgtgagaggtagcgactcgtcgacgcaccatgtttcttttcgagcaaccatatctaatttttttaagagcgtactttattttttttatatacgtaattattcgataatccaatggtttatgaaatttgtgggtaatgatgtagcataaagtgactttagtccttgtacataatttatagtgttaaagagttgacaatgaagaaattttaccaaaaactactatagttcctgaagcctaattgcgagagttgtggtcggatagctaaaatgtgcttttagaaattttgcattaggtaacatgtttttaccaagtcaaataaagtctagtgaatgaaaataatatcttatagctgggatgaaatatattggcaattttttttttggataaatactctaaatatattggtatttaccttcaccatttagagtgaatgtcacttggggttggggtatcagattggttaaatttgctttattaggcggtaatttttagtagcagttataaataatattttatctaaagtaaggattagaatattgatgttttctgctagtaaagaagtttcctagatccacttaaagccaatcatcttagtggcgtgatggtatcaaacatatatagatgaatgtttgaaaaactcgagagtgcgagacgcatcaaattgcaaacgagtctgttcatattataatgacatgttgaattatcttaataagacaattttagccatctagatgttaatcggctaactattttgctatagaataaggattcatccaataacatcaaaatatagccctgttattcataatttatgtaagaagagaaaatacttttctatgacaattaagcgaattaatccattagctgctccaaggggtaactaatgaaagtcaattaaagcttcaagtgacgtatcacatactcacaatgaaacacttattttgctgatgttatggaccattatggttttattgattagaaagcaaatattataatgtgaaactctagtggtagagatttcttgcttgtcttttactagtttccagctactcttgttttgtccgttttggctattccacgatctacaactttcgggttcatatcaatgtccaagaggatattactagcaattcctcctatgatgtgaaatcgtctagtgccaaaaatatatcagttttaaaagcattggtttaacttaccaagcataaagtaatgaagacattacttttttttggcacaaactcatagaaaagtattatctatgattcttcaaaataaaacccaagtagttttatgagaatttatattttgaagctttgtcatacaacaacttgttgtgataaacaaccaactagattttaatccgcggtacaccgcatgacaatttattttaaaaattagtttatataaaaatttgtaaattatatttatttataaaatttatattttatagtttatatttattattaagtgaaaatataccataaatttatgagataaatattaataaattaaagatttaacccatatgttaatatttattttgaaattatataaatacaaaaataaccgaacggttattgctttagaccgatttcgtaaacaattccacaaacgaaaaacaaattcgtaataaaggcgttgtgggttttggttaacacccggtttgtaacggtctttgcgccttatccaaaaaaacctcctaaaaccttctcaccagccattgattcacaatctcaaaattcatcacagcgaagaagatgcgatcttcgtttctagtctcgaatcctccatttctaccttctctaatccctcgttacagttctagaaaatccatcagacgtagcagagaacgcttctccttccctgagtctcttcgtgtctctcttcttcatggaatccgaagaaacattgaggttcgcttatttccttctctcccatttgaacaacattgatgggaatgatctgattttctgggtttttgttgtataggtcgctcaaggagttcaattcgatggtccgattatggatagagacgtgaatttggatgatgatttagtggttcaagtgtgtgtgactcgtacattgcctccagctttgactcttgagcttggtctcgagagtctcaaggaagctattgacgaattgaagactaatcctcctaagtcatctagtggagtcttacgatttcaagtactgatttgttttcatatcttgacttgtcttgtagatgttgtaagcttatttatatatgtgtttttgaattcttaggtggctgtgcctccaagggctaaagctttgttctggttttgctctcaaccaacgacttccgatgtgtttcctgtgtttttcctctccaaggatactgttgagccttcttataaatcactttatgtaaaggaacctcatggggtttttgggattgggaatgcattcgcttttgttcattcatcttcagttgactccaatggacatagcatgatcaaaacgtaagcttttcgttgcttagtatcaattggttgcagatgttctgaagttctgcatttcacttgaagcagttaagctaactaacttctgcagattcctctcagatgaatcagctatggtgacggcctatggttttccagatattgaattcaacaaatactctactgtaaatagcaaagatggctcttcttactttttcgttcctcaggtgaagtggcatttgactttatcatctagctgttgaatctatgaaatgtgtgtaaccagcgttcttacattgtacatggttttcaataccgaaatttcaacagattgagttagatgagcacgaggaggtctctatattagcagttacattggcatggaatgaatctctctcttacacagttgagcaaacaattagttcatatgagaaatcaatttttcaggtatgctgatgttccaacattatctttttagtatctgctattaattcagttaaaacttagaatctaaaaacattccaagcattttgttatacatgtccaaggcaccatgttctatctttgaggacactaaacaatgtatgtaaaactgtgcctaagttgattatttattggaatcagggaactaaagcttcttattcttcatctttgtgaaaaaactgttctcttctccattgaggttaaaagaacaagagatggcaactttaggttgtaactccctgctctctagtgacagctcatcacctgaaagtaaaagttacttgtaacttatctgtgcttgtggtttggaagcaacactaaacagttttaaacattttttcaatacaaaaaacaatttcttatgttgaatagaactttatcatctgattcctttagtttggaactgatcagttgaacctttttagtgcagatttgtttgacttctgtcaaaatcagatggaaagtcatactaaagatttcctgaatgtctgtttcttctttgttctgttttttctttaatctcacttttggttcattttcttgcaggtttcttctcatttctgcccaaatgtagaggatcactggttcaaacatctaaaaagttctttagcgaagcttagtgttgaagagatacatccacttgagatggtacatgctttacttaggttctttcccctatttcttaagtagctgaacaggatgcaaggatagatttgattatttgtctattcatcaaactgtttcctgcacattatctgatattaaaaatctagcaacccgtgttccatgtggatcttatttagctgactctctgatacgttctataaaactaaacactctcatgcaaaatggaagaattttcttataatattgtttcacgcgcttggacctcacaacttctttgtctggacttagtttccttttcatgccactcattattatgttaatatttgcaggagcatatgggctttttcaccttttctgggagagatcaggctgacgtcaaggaactggtatcttctttaccctggtaattttcatccctgtatttcagaatttaattattgtcctcgtatgtcgtccgttggaatttcttctcctcagaacatttggattctatatggtttgatttctagcttttgttgcagaaaagtatacaatcatcatgtcagttccattgcaagctttcacctgacgttgttttctcaaacaacatggtacgtaaatatataagtatggtcatattttctaaatatatctttagatggttcggcttacattttactaaagactgttcatcatacactaatagtaatgttaagctccaaaatagaactcgcggtatgcccttttggagagattctttacttcgacttttttaggaagtggaagaatcgacatgttgttcaaattataaagcattctgattattgcacaaagatgctcagtggtttcgaagggctgtctttgtctagtggctgtaatttttgaacattgctgttctagttatcatcaaattcttagaaacagaatcttgggatggtctaaattcaagtttcttttctttttgtttcttgttttttttcttttctaatgctatcagctgaatcgagagactgaagtgagcaacttcttgagagatgaagctaacatcaatgctgtatgggcatcagctataattgaagaatgcactcgtcttggtttgacggtgagctgacctttcaaataatctgataaaatctcaaatttgtatgtcttttgtcataacatactaccacagtacttttgtgtagcccctggatcaaggtcttcccatcttgctatcgctgctgccaaccatccccttacaacgtgtcttgcatgctttgatgaacgatctcttgcgtttcacgctattggttatgctaaaggatccctcaaaccagcagtcattataacatcatcaggaactgccgtttcaaatcttcttccagcggtcagagttgtgcttatttatgcctcactaaattatcttgttagcttgttgcatgctacatactttgccaaacacatgtgttcccttacagggtttgtttaatgatttttgacaaataaaggttgttgaagccagtgaggatttcttaccactgctactacttaccgcagatcgtcctcctgaacttcagggagttggcgcaaatcaagcaataaatcaagtaaggtcgagataagacctttctttgaaactatacgtttgtatcccagttggatctgttggcgttttcctacaatttattttgttttttcatgtgtaacagataaaccacttcggttcgttcgtcagattcttcttcaatcttcctcctccaaccgatcttattccagtccgaatggtccttacgactgtagactccgctctacattgggcaacaggatctgcttgtggaccagtacatctcaattgtccttttagagacccacttgacggtagtccaacaaattggtcatctaactgcttaaatggattagacatgtggatgtctaatgctgagccattcacaaaatattttcaagtacaaagccataaaagcgatggtgtaacaactggccaaattactgagatcttacaagtaatcaaagaggctaagaagggtcttcttcttattggtgcaatccatacagaggatgaaatttgggcttcgcttctgttggcgaaagagctgatgtggcctgtagttgcagatgtcttgtctggtgtacggctgcgcaagctttttaaaccttttgttgagaagttgacgcatgtttttgttgatcatcttgatcatgccttattttcagactctgtcaggaatttgatagagtttgatgttgttatccaggtaaatatatcatccttttatttttgcttcatgcatctaagactaagtattgaagatgatagatagagttacacaggtactgttggatatcttgtagtacttctcaattgaaaaatttctttgggttaggaatgccttgaagaagtttcaattaggataaggaattggaactatgtaaagcatgactcgatctttcatatccatcgcatgttagggttcttttaacatatgcggacttcaaaccaataattcattgagtaaaaattagttatgttgatgtgtatctgactgagtttgtaaaacgaaatcatgaataggttggaagtcggataacaagtaaaagagtttctcagatgctagagaaatgctttccatttgcatacattttggttgataagcatccatgccgacatgacccatcacacctggtcactcacagggtccaaagcaacattgttcagtttgctaattgtgtgcttaaatctcgatttccatggaggagaagcaagttgcatggtcatctacaggcattggatggcgctgtatgtcctccagacaaccctttcccttaaaatcccttataagatcaaacatgaccgttttctgaaacatatgtatcgctgtagattgcaaaaagatcaatttaactcttactgcttttaatagttcattcttctatgcagattgcccgggaaatgtcatttcaaatatctgctgaaagctccctgactgaaccttacgttgcacatatgctttctaaagcactaacttctaaatctgctcttttcatcgggaatagtatgccaataagggatgtggatatgtatggatgtagttcagaaaattcttctcatgtggtagatatgatgttgagtgcagaactaccatgtcaatggatacaagtaactggaaatagaggagctagtggcattgatgggttgctcagctcggccactggctttgctgtaggatgcaagaagagagtaagattttaaatgattttttcccccttttatgcgtgaagaagtatcagaaccatttactcatgtgttttgtttacaaaataaaaaatcaaatttcctgattggtcaaacaccgtatatcaggtggtctgtgtggttggggacatctctttccttcatgatacaaatggattggcgattttgaagcagaggtagccctttcctctattttattgttgtagtttcactgttggtggatttcacacactgaacagatatgtcatggtttttaagtcaattaacgattaatttctggtgtttaatctgacttgttaggattgcaaggaaaccaatgacaattcttgtgataaacaaccgtggaggtggaatcttccgacttcttcctattgcaaagaaaacagagcctagcgtgttaaatcaatatttctatacagcacatgacatttccattgaaaacttgtgtttggcacatgggtaaaaaacatattcacattttttactttgttttcctttcccactttgctattatttaatgttttacatgttaagtttgttttatatacgcatgaccatagcacagatattgatagaaaatacaagaaaaagtaatccagttttggtagcttagtctatagtagcgtcagttctccatgatttacgatgtctttgattatctagggtcgtcatggtttacagtaagaaataactcagccaaattgctatatatgcagtgtgaggtatgttcacgttgggacgaaaagtgaacttgaggatgctctatttgtaccaagcgtggaggagatggattgcattgtggaggttgaaagctctataaacgctaacgcgattgttcataggttattttgggcttttgttttatttttgggttttacatgtcctcacttctggagcactttgttgacattgaatactcgcccacagcactttggagaggtttgcacgccaagccgcagaaaattccctgggcattgtttctgccagttcttttcttcatccgatgatcaaaaatgtacttctttgccaagtctctggaatacaatattcgcagtacaggtaagaatccgtcagagactatatctgaatattaccgttttcttttctttttgtctaataaagactctatttgcagagtcaaactgtgtgacagacctaccatatgttctgatgaattctctcaattccatcgagaagggttcatactctccctgactttggaggatggaagcattggctatggagaggttgaataatttattctttttaatttttcatcagtaaatagtacattctcttacatttgtgttacttctcccaggtcccactgagaatcatgtttagcttgtattagacttacatgtgccactgagtatcatgctctcgtgttgtgtttcatgagcaggttgcacctctgaacagtaatgtagagaacttaatggatgttgaggggcagcttcagttagttcttcacctcatgaatgaagctaaatttagttacatgcttcctttgttaaatggctcgatttcttcctggatttggagtgaacttggaattactgtaagcttacctagccttagttctgtctgaagaaaattagtttatccacacagctgatgtcagatgtaagcttacctaggcttatcaatttccttcttttgtctcaggcatcatcgattttccctagtgtcagatgtggtctggaaatggctcttctaaacgcaatggcagtaagacatgattctagtttgttggggatacttcattatcagaaagaagaaaatggttctgctcagccacactctgttcaaatatgtgcccttcttgattctgaaggtactccactggaggtcgcatacgttgctagaaaacttgttcaagaagggttcagtgctattaaacttaaagtaagccaacgttccttaatcatacaaacaagatgctcgatcatcaagtaagataggcggataattattttattttatgattgaatggtggctttctcaacgttcagtgctattaaacttatggttgagttttagcatttcatgcataaattgaagtggttggctttctcactttgcgaatttcaagctattgattgctgactggtggataaacctgcctaaaatgacaggttggtcgtcgagtgagctctgttcaagatgctttagttatgcaagaagtaaggagagccgttggcgttcaaattgaactccgtgcagatgcaaattgtcgttggacttttgaagaggctagagagtttggtttattggtgaacagctgtaatttaaaatatattgaggtctgcttctgtatgaattattgctatctgattgtgttatgaagtattactccaaaataactgatttctcttgcctatataacttcagtgacaaacgttttgtatatctcaggaacctgtccagaataaagatgaccttataaggtttcatgaagaaactggattaccagtggcacttgatgagactcttgatgattttgaggaatgtcctctgcgtatgcttaccaaatatacgcaccctggaatagttgctgttgtaagcccctggtcattttttacaacatgtacatgagcctgacactgtcaaaagatattttctttcttgtgtgcttatttcttcgttgatcatttcgtcttgctcccttttttaattgatttggagatggtttattagtttttattgttacgatcaatcatatatcattttaaatatcggctctatcttatgtcatttttgctttcaaactaaatagtcttgactttgttttatcatacttggagttgtaggttattaaaccaagtgttgtgggagggtttgagaatgcagcactgattgctcggtgggcacagcagcatggaaagatggctgttataagtgctgcatatgaaagtggcctaggtttatcagcatatattttatttgcatcatatttggagatggagaacgtgaaagcatccacagagcagaagcaaggaacgcccccttctgtagcccatggtcttggaacttaccggtggcttagtgaagacgtaatgatgaatacattagggatatttcgtagcccttacagtggatttgttgaaggatttattgctgatgctagtagaaatctaaaggatgttaagataaacaacgatgttattgttagaaccagtaaaggaattcctgttcggaggtatgaactgagggtggatgtagatggtttctctcatttcataagagtccatgacgttggggagaatgcagaagtaagcttgtccttgtttgtaattttgtatctccgaagctaaaaagacataaaagctgttcttggtcaattactctcttgtttttcactctgctgtaatgtatttttcagggaagtgtagctttgtttcttcatggatttcttggaactggtgaagaatggatccccatcatgacgggtatctcaggatctgcgagatgcatttcagtcgatattcctggtcacggaaggtcaagggtacaaagtcatgctagtgagacccagacgtccccaactttctcaatggagatgatagcggaggcattgtataagttgattgagcaaattactcctgggaaagtaaccatagttggatattccatgggagcaaggatagcactgtacatggctttgaggtttagcaacaaggttggttcccttagtctggaaatttaacattgtttaatgaagtatataatggaatttggaagctattctatagatcgaaggagctgtcgtggtatcagggagcccgggactcaaggatccagtagcacggaaaattcgaagtgctacagatgattccaaagcacgaatgatggttgacaatggactatatatctttatcgagaattggtacaatggaggcttgtggaagaggtgactttctcagtacattacaactttttgttacttttcttttttttcggttccccggacttaaactgattactcacatgagcgatctttgcaatgactagcttgagaaatcatccccattttagtaaaattgctgcaagccgcttgctacatggtgatgttcctagtgttgcaaagctcctgtctgatctaagcagtgggagacaaccgtaagttcatggtccttgcaactatttatatatcatgaatttgattcaaatgggataatgtctgatgactataatgatattgtcccctttgaaaaataggtcattgtgggaagagttggaggattgtgatacaaatatctcgctcgtattcggggagaaagatgtcaaatacaagcaaatcgctactagaatgtaccgcgagatgagtaaaagcaagaagagcgtaaacaatatcatcgagatagttgaaattccagaggctggtcacgctgtacatctcgagagccctcttcgcgtgattctcgccctcagaaaattcttaacaagagttcacaacagttctacagagacagagctttctcagaagctcttgttagcactaaaagaaatgtaaaacagatttggaacatgaagacatggttatgatcatatgattggacctgtttcaggcctttagtactgaattgtttcaaatttcaattgtattgaatactagcttcttcagagatatgttttcaagaataataattaattgattcaaatactattttaacagtcaacaggtacatgtacaaccataatcacaccgacagtaacaagttccaagctcgcattccctaggacagaacttgtagcagtcaccatctgtattgcaaggcctgatatcatccatcacatgtgctatcggtggcatgcaattacagttcttctttccttcaggacatttgccgccgatgcaattcacttctgctttcaccatctctctagcatcacctaaagatgaacctatatcaacaaatacacaccataaacgtcaaacaagaccaaaacaaaacattatataaagaagaacttatcatgtagaagaagcttacaaaatgctatgactgtgagggagaacaagaagataagcttgagagacgttttctccattgcttagttaatgtaatctcaaaagtcttttcttgtttattttgaatgtacaagttaggaagagagaagtcagattgtcttcttttatataccaagtttgattacacattgttttaatccaacttgtgaaatttctccattttaggaaatcatttgatagtttgttgaatttgtatctgtagagggaattaataaaccacatacatgcattgtttgagataaatacaagattcaatgctattgccaagagaatccaaagacattttagaattgaagatatatttcctttaacaaaagccaaaactggtatgtgactcaagttgacccaattccagttgaatagagtgatgcagagatattttctacaaggagaatattttctatttcttataagttatgatggtttctaatttctttaacagtactcacacaaacaggttccaaaattacagtcaacaatcttgcagcccttaggacagtacttgatgcattcgttatctgtgcggcaagactcattggtctcatatatgtccattgttggtgctataagaggcaagcagttacagtccttctttccatcaggacaatggccgcctatgcaattcacttcttctttcgccatctctctcgcggcactcaaagacaaaccttcacaagtacacaccataataaaacttcaaaacaaaaaccaaagcaaaacattttataacaaagaagaagtttttatagaggaagcattacacaatgctatgactgtgagggagaacaagaagacaagcttgagagacgttttctccattactaattgtaacctcaaaatcttttcttgtttcttttttttttgtaaaagtgatgaacagagaattcagattgttctcttatagagaaagaagttaaatggcaacaaatcttttgtgtgaaggttttaccaaatttagtctgattcttttttagtccaactggtgagatcactccatcttaggaaatcacttaataattgaaatgtgttgtttttgtagaggagataaaccaacacttgagatacattgcttgtaataaatacaagataaatgagtatttacaacacaatgtacaaatggcgaatgctatggccaagacattttcactaagatatatttccttaataagtcacaccaaagaatgaacaaaacagcacaaaaactaaggccacaactagtatgtgtttcaatttgattgctcttctgatctcgctactcttttcagacacagactgcttctctggttcttcccttgttctctcatcctcctgttcaaagaaagcaaagacccacataagattagtaaccaagagatgtctggttttcacatccatgacccaacaatgatctatatttgccccatcgaccattctgaagcatcaaagctatacactaatacacaagaaagtacaaggaatttcgtgtttttcttgtggaaaataaactgaatacctgcctgcagactttcagcaagtgcctctatttcgtgaccatctgcgtgaaacgacagctctttgtccccagcataagatccatttctttggtatgtatttgagcactgattcactctaagtattttgttttcttttgccaaagaatatagctggagaaagaaaaaacattaatgtgtcaacaatgctatgctcttgtgtccctggcctaaagaaaacaataatgcacttagccaaaaagtacctgctcttgtatacgctccctttcactggataattgcaacatcatatccatcaaaactttgttccttgtagttatttcttgtgcatatctctctttctcattgttagctagatccaacattgcttctaaggatttggctttttgcctcaaaaagctcacgtctttgttgagttcagagtttgtggtagaaagcacaatgcattgctcctccactgtctccgttctactctcggcttttgaggctttagacttgagatcttctattaaggtctccatgtcccatattgctgaatacaacatgttctgctgttcttgatttgcttctgatgataccttggagttttgtacttgaacttctaattccctgacttgcttctcgagagagttcaccttcttcgtctttttatcatccgcatctttgagaaaatttagttcctcagtaagttcaagatttgcagcatctagctctttaatcttagcttctccactctcagctctgctttcagcctcgaaaaggttttctttgaccgactcatttgcattttccatttcagctagatgtaccaggatttcttgtttggaggcgttgacacttttcagctcaaggtcggtatttttcagcttttgttcagctgacttcacatattccctcaaagtgagtacttctgaaactatttcactattttctgaaattgttccctcaagcttttgcaccagaagatctttcgcttccagttgtacagtgcaatcttcaagcttagacttaagttcggattcccgttgtgctgacccattcagactaaactggagaatctgtagacgaccaacaagttcctttgaaatacctgtaagaacctcagaagaattatctgcctctagaaaccgtccccatataaactctgatgcttcttccatccgagaagatacctcctctgtgtagtgtagcttgagtttcaactgttcctcattttgctggaattccattaacttcttctcaagctctagctctcttgacaatgacttctccagcatcctcagagcatttttatgcctcaagtccgatggtttcagcgcatatttctgccttaactccactgactcctcgttttcacctgccaacatttttgtcaataacaacaagaagctaagaaaaccaaagcagcaataactttaaaacaaccatatatcaaaagtgattacttgttccatttcttatgtaatgaagtgttcttcggagctgagctaattgcaaagtgatctctgagacttgtcctctagactgcttcaatgattctgcagattcacccaactttccttcaataacaatataatttccgtgtttgcaagaagatatcttgtaagaagtgtcaactatttgagcttccaacacatccaaaacctcgtccacctccttcacttctgactccaatataccgcataacagatcaaacgtcaaagctttttcaaaggatgctggagaagaatcaagtgtccccatcccttcaagatcattatcccatgccaaaagatgcataagaagaacatgcagattcatcaacttttcactagtataagctgagtctatctctagttttgtcaacatcctcaacatctcttgctcttcctcattcctactagacaaagcttcaaaatagtcctccctaatgatttcctccattcttggcctaaaaatcaaaagttcaaagcttagctaggaacaagaaaaaaaaactaatccaaaaaaatggatacttaggtgaaatgacactatctttctaatgcgaggtatcgcagttccaatcctagcactagtcatagctcaattcttctatatgaaaccaatcattcatcaactgaaaccagaacatccaagcaaataattgaaaatgtaatccaagtacccaaaaacacattatagtaagtgcaactaaatcaaatccttactttgaacaaaacctaagcaaagagaagtgaaatttgagaagaatccacttgtcaagaaagagaccaataagccaagtcagttaatgttacatacttgtaaagactcagcattttcaaagagatccaccagaaattcttactaatttaacaatttactacaacgagattcaaactttaccataaaaccagaacaaaaatatcaaaattcaacaagaacaaaactaaaacttggaaacagacaaaacagagtgttgaagattcaaagaggatctgaaaagatcaaaactttaccgatgaaaatctgtagttcgagtagatgaaaaaacagagagagcttttactccgtcaacgaactccaattttgcctttcaagaatggtacggtgttttctggcgtcagaaaaattgatgctaaaatgcgcggaatttgtttacaagtcatccaacgataaagaaagagccgcgcatgctagcgttttcgcttacgttagcgtgagtgttatgttgtggtggacgttgaattattggtaaggaagaagaacgactgcttaagctgctcttattggttacagctaaaaaggcctaaatataactgtaatatagttagcaattaatgtaatatttcaaaagtttttttttcaaaaattctgatttagaattatatttcgtctgtaacgtctagataataacatgatacactcacatttaagattataattttattcaaaaattcaaaaaatttaatgtatcttttttttgttagtggacaatttaattcccaaagttaatgcaatttattatagaatagcatgtgtgtaatgataatattattgaatttatgacatgtatccactctaattcaatttcgtgaccgtgagtgactaaacatgagagagataaattgtttcactgtcaacatatgtttgagacttgacaccaacgtaattgtggatatgtagaggagatgttaaattgatagtctacatgatgtgattactttgtttatgatggtttagttatatggtggtgaaaatgtgaatgatctgtttttgaaagcagttataatggtgaagtgttaagtatatgacagaaagatcactaggatgagacgagggtgattgtgattgggctcttaagtggccgtgactacgtatagagcaacttggtgtgatatcatgtactgaaatacatagatcataagattgtttgtttagtatatatatggacatttagttacgttgttcatgccttgttatatagtgcatgctaagacattcgaggtaaggaatctatgcatgcgagattagatgattattattaagacatgtcaaggtaattattgctaaaataaatttctttattccctagttgtcgttgataacttgaccattttagagcatagttaaactaaaatttagttccttttttttttatggttccaagcgttatacaatttgataatattactgataatatattttatatcaggtttgtcatatatagtgtttgaattagacattctttatatgtaagatatactactagtgaattacttaaaaaactgatactattttcttgtcgtcaaacatagattttaatactatatatatgcctaaaagtccaaaatagtttttcattatgaaatggaaagagtataacacatgtggtgataatgggtggtatagttagtaaaaactaattacgagctctcttgtatggctcttatgtgtaaaaaaatgactagttacatagtggagataaacaatattgacgtttaattatgcagcaagagattaaactatgatatagaaagttaaactatggttaataattagggaattaaaaaatagaaaaagagaagataaagtgaaggtgtgggctggagaattcaattattataaggtttaatttcttaggtctttggaaattgcaagtcccaaggccaactaataatgacctcgatctttgcgttaaccggaccgtccatctactcttcctttattttattttaatcatttttccactagttaatacgtttacacttgttcatgacccgtattaaagaaaagaatttgtgttaggagaaaactaaacaattagcgtcaataatcatttacctagttaataaaatacaccgagttgttaatttttattaactaaaatcaagtaactttgacatcgatcggtaatttatttcatatttcaattagtgataacaattataatcctaatgatattcttaggaaaactaacaatgaagttattagcattaactgggacaattcttgatcttacgtgtgctttgatctttgacttcaccacaagctagcatattagcagtagtatataatgcacggaatgaaatcgtcatcacttcattggtatcatacgaaggagtgttggaatatgcaaaaaaaagaaaaaaagaattggtaggctcaaattattaggtctcttattgtatttgtatcagtcgaagatttgtttttcttacaacgtaaatcgtagtggtttgtatttgtaagaagatataacttgtatttctcaaatttaagtatagtgcttgtaaattcctcatatattattgaacatttttctaaatgcaaaaccaaaatataaaataaaacaattgaaccttttttacattgtacaatcaacaacatgtactatgtcatacgtatgatgtgatgtcaaattatattcttcaacatggagttgtgaaagttccatcagataataatttgaccaaattaagtgattcatgtaaccattttgaacagatttcaaggttgtttaaatgattggagattggtcacatatcttacacattacaatttattatggtagagtttttagagattgaataatgtgtggatcaaaccataggaacttgtcgcataaattcgttgcatacttgttttgtccggtatactagacatttcatcaatttgctttagcgcatcttcgataaaacttagtatatgtattacggttataatattagcagagcaataaacttctgagtaacacttgatcgtcaaggtggagtttgttggctttgtgaattgtgatgaagtagaaaaagatttgaaccatagaaagataaacttatatgtggagaattccactgcgttatataatgtctataatagaaccatagaaggattaaactttttgaaaagcctaaaagtaagaaataattgtaatctttttcttgctaacaaaataattgtagtttaagacctctatcgaccacgaagatctcgtagattatttgactaaccaagatgtacgaataatttttatttgaataaagtttcccaactctcaagttgcccttaagctgacagaatgtaacaacttgaatatctaattaaaccactattccaagatacagtaaaagatctatctatgagttcaataatattattttctaatcttaatattattgtaattgctatgaatattttaataagtcttagcagtactgtttacaactagacttgagctgcaaaaaaatattcttgaacgaaagcaaccggtcaaaagacacaaaaataacttttttaaaaaaatataaaaaatctccaacaaaccgtgcatgaaaacaaaagtatttatttaagaattacctatgattcggtacaaaatccaaaacattgaacatgaaaccaataattgttatgattattctcaagcattatactaccatatagtaacacagggcaatggaaaagagtaaccctcttttttagtatatgaagaaaaaaaacatttgaatatatgggaacttgaacttattcaacattgaaactagctgataaaatcataaaagtatgcacatgagacatgatgactgactaaaaataagtgttgaccaacaaaaaaagagagtaaaaaagactgaaaaaagttcataaaaatagtctttatacagtatacagtttttcacaaataaatgccaaatagaattgaatgaatgattactaatgagatttaccagacaaacctaattcattaattatgaaaacaagaaaaagaaatcatgaaaatctgtttttcgaggattttaataacaaaaggataaaataaaataaaaaagagagaataagataaccccaaaatgaaagttgtcactgtcagctcggattgtttagaattggaataattacgtgtttaattaaaccatacacagatttaactaatcaaatcacttttaaccaatttttaaacctttagctcacaaaaaaaaaatgtctctgcaaattataatccttgaatactttggctatggcggtgtttatgtttaatgatcaaaaagctctgttttttatgcaagcgtgggtataaaatccagttccttttccgattttttgttcttccttcttcttcacttcctttttttcttctccatttctcaaaaaggccactcctttgcttatctttctctctctctgcagctgaagaacagagaaaaagggttttttattgtctgacccaaaggacccagtttcaattcagcttttgttgttagaaattgaggtaaaagattcaaaatttgttcagaaaagtggcacagattctgaaaaattaatatctttcttctcactcttttagctcgattctaagcttaaatctggtttagggtttttggagtttgtactgataaagcatgatcctttttgtcttccgttgactgattctgttccttttctcaatatattgatttgggcttctcttgttcttcatcgaatcattggtcttcaaggtgaatgtgtttgtgtagtggcaagtcttgttggtttgtagtggttttgatcttggagattttctgattagtgagtggtgttcatcaagtattagaagaagatggatttaagtgcgaaagatgagttttcagcagagaagaggaatcctgataactatgattctgttaataatccgtctggagattggcgagttgattcatatccttcagagaatctgatttcagctggtcctgcgtcttgttctccttctcagatgatggattcatttgggcaaactctttggtatgatcccacgagtgttcaggctgttggttatgccggttttaatggtggtaatgcttcgtcttcttcgtttaggggtagtattgatagatctcttgaaatgggttggaatctgcctaatttgttgcctcctaaaggcaatggtcttttcttaccgaatgcgagtagtttccttcctccgagtatggctcagttcccggctgattcaggttttatagagcgtgcagcgaggttttcgctctttagcggtgggaattttagtgatatggtgaatcaaccacttgggaattctgaggctattggtttgtttcttcaaggtggtggaacaatgcaagggcagtgtcaaagtaatgaacttaatgttggtgaacctcacaatgatgtatctgtagcagtgaaagaatcaactgttagatctagtgaacaagctaaaccgaatgttcctggatcgggcaatgtatccgaggatactcagtctagtggtggtaatggtcagaaaggcagagaaacctcttccaacacaaagaagaggaaaagaaatgggcaggtgaagatttgaagttactcgtttacttttgttctctccgccttattatgtttctttttgacattcgtaatcttttctgtttgtagaagaactctgaagcagctcaatcacacagatcccagcagtctgaggaagaaccagacaacaatggtgatgaaaagcgcaatgatgagcaaagtccaaattcacctggaaagaagtcaaacagtgggaaacaacagggcaaacaaagttctgatcctccaaaagatggatatattcatgtacgggcacgaagaggccaggccacaaatagccatagtcttgcagaaagagtacaatttctaaaactatcttggaagtttaagtcgaatagaagctatctcttcttgtatttttcatctaattactttgcgatgataggttaggagagaaaaaattagtgaaaggatgaagtttcttcaagatctagtaccgggttgcaacaaggtaaggtcactttaagtgttgataatgatggatattaatatgtaagaagagagacaaagctaattcagaaaaatgaatgtgtgtttgcaggtgactgggaaggcagttatgcttgacgaaatcataaactacgtacaatcactacaacgccaagttgaggtatgccgtttcctaattctcaacgaggtgctctttgtgtttgcttcttgtaatcaattcttttgctcatttctcttttgcttaaacagtttttatcgatgaaacttgcaactgtgaacccacaaatggactttaaccttgaaggtcttcttgcaaaagatgtaagatattttaactaattctcctaatcatttgattcgtcataagattcttataaactgaattctatgcgcaggcacttcaactacgagctggttcttcatctacaacaccattcccaccaaatatgtcaatggcttatcctcctctacctcatggattcatgcaacaaactctttccagcattggaaggaccattacctctccattgtctcctatgaatggtggattcaagcgacaggtatgtattagcggtgtggaaattgaacaattccgagctcagaatctgattttgttggtgattatttgtgtaaaataggaaacaaatggatgggagggtgatttgcaaaatgtgatccacattaactatggagctggtgatgtcacacctgaccctcaagcagcagctacaggtgaaaactgaaacctcttttactttcttttttcaccaagcaataagaattttgtttggtaaaacttctctgtaattttttttataacagcatctcttccagctgcaaatatgaaggttgagccatgatatttcgtcctgttagatagaatattaaattattgtaatcttttttatttatttatttaaagttgctatatgtactatattgtaatgatgttactattaacgaatacgatacttagactaaactactactaagcgtttgagattagtggaagaagagtataaactgtgaacaccaacaatgcaaaatagttttgtataagtcaataacattttagtttggtctgctatctcaatctttgtattgtggattcgttgttacgacggaaaatgcctgatgcggctatatgaaaatataactcgttataaaattttgccaaataaatgttatgatgtataatagaatatccaatggagtatagtgatgaaacgatttttgacgaatgtttgagaaaaaagtcttaacaacgaaaccagaaatgttttaagaagattccttgttttcttacaacccaaagaggagacacacacacagatttggaacgctttgacttgcaagcttcttctaagacactactctagtagtctctcggagattctatcttcactctctggtttattcaattaaaccggttggtttagttccatcaattttcttttctcttttatttttattgctagttttgtttgttattttgagaatggcgtcgaactactactctgttcagataaagcaatgcattgggttgggagctagaaatcagagtcgttatgtgaagatgatccacgggaatatcatcagagctcttccatatccagagacgtttttgtataacaacatcgtccacgcgtatgcgttaatgaaaagctccacttatgcacgccgagtgttcgacagaattccccaaccaaaccttttctcctggaacaatcttctcttagcttattcaaaagctgggcttatctcagagatggaaagtacctttgagaagcttcctgatagagatggtgtcacttggaacgtgcttattgaaggctattcattgagtggattggttggtgcagctgttaaggcttataatacgatgatgagagatttttctgctaatttgactagggttacgttgatgacaatgttgaaactttcttctagcaatggccatgttagtttggggaagcagattcatgggcaggttatcaaacttgggtttgagtcttatcttttagttgggagtccattgttgtatatgtatgcaaatgttggttgcatctctgatgcaaagaaggttttttacgggttggacgatagaaatacggttatgtacaattcgttgatgggtggacttctagcatgtggaatgattgaagatgcactgcagttgtttcgaggaatggagaaagattcagtttcttgggcagcgatgattaaaggacttgctcaaaacggacttgcaaaggaggctattgaatgtttcagagagatgaaagtacaaggcttgaagatggatcagtatccttttggaagtgtactgcctgcttgtggaggattaggagcaataaacgaagggaaacagattcatgcttgtataatcaggaccaattttcaggatcacatttatgtaggtagtgctctcattgacatgtattgcaagtgtaagtgtttacattatgcaaagactgtttttgatagaatgaagcagaagaatgttgtgtcttggacagcaatggttgtgggttatggccagaccgggcgtgctgaagaggctgttaagattttccttgatatgcaaagaagtggaattgacccagatcattatactctgggacaagcgatcagtgcttgtgccaacgtaagtagcttagaagagggctcccagtttcatggaaaagctataacttctggcctaatacattatgtcactgtttcaaattcattggtgactctgtatggaaaatgtggagatattgatgattcgactaggttgttcaacgagatgaatgtcagggatgcagtctcttggactgcaatggtttctgcgtatgcgcaatttggaagggccgtcgagactattcagttgtttgacaaaatggtacaacatggtctaaaacctgatggagtgactttgaccggtgttatttcagcttgcagtagggcaggattagtggagaaaggacaaagatattttaagttaatgacaagtgaatatggaatagtgccaagtattggtcattattcttgcatgatcgatctcttcagtcgatctggaaggttagaggaagccatgcgttttataaatgggatgccttttcctccagatgcaattggttggactactttactcagcgcatgtagaaataaaggtaacttggaaataggtaaatgggcggctgaatcactcatagaattagatcctcatcatcccgctggttatacgctattatcaagcatatacgcttcaaaagggaaatgggatagtgtggcccagttaagacggggaatgagagagaagaacgtgaagaaagaacccggacagagttggatcaaatggaaaggaaaattgcacagtttctcagctgatgacgagtcaagtccatatttagatcagatatatgctaagcttgaggaattgaacaataaaatcatagataatggttataaaccagataccagttttgtccatcatgatgtcgaggaagctgttaaggtaaagatgcttaactatcacagtgaaaggcttgcaatagcttttggattgatatttgtaccctcagggcaacctattagagtaggaaaaaatcttagagtgtgtgtggattgccacaatgccactaaacatatctccagcgtcactggtagagagatacttgtcagagatgctgttaggtttcaccgttttaaagatggaacttgctcatgtggagatttctggtaggttttatcttggaattttctgaacatagagcgaagtatgatgaatctccatcactagtctgaaatatcaaaacagagccaggaagattcaagtaagacttatctctctttgctttcaatattgtctcattttctgatgctagtcttctaaatttattttgtcctgcctgattagttgcattggactccaattgggtgaattggcctagatattttgacagggtgcattcatataattcgactgcaacatcgacaaagctggagaacgtgaattgtaagacctatcaggatttgtgatcttatatattataaagttggaagatgggtggtttagttttcgttgtttcaatatgctaactggaaattggtgttctataaaggcatgtatagaaccacaaacactaaagctctttgggattttacgtcacacaaatctttttgtataggatatctttttactaactgattagaatttgtatctgactttatgtgctctattggtaatagcagataatgctgattgctgagtccactacttccactttatcactctgcaaacatgctagaagctgtgtactaagcagtgacctgcatacaaaagtaaggcacagagaccaaacatctaaaaattggtgaatggttgtatgcattggtgtgaactagttatgaaatatcttcaatatcataactagttcagatttaatgttggttttgataagacaacttggaaccacacatatatctataaatttgaacaaatgtatatttttagccaactttgcaatcgagaaaaataaaatagtcgacagtgttcctaacacagaaagatgaacacatacattcagaacagagttcaatcataccaagtcaaagaaatatacaagtggattgagaagtctggactattttcagacatggacagaagcagaatgtaagactttgacgctaaatgagtgtgagagaggatcaagtttgtagacagcaccggaccacacaatcttcccccaaatctcgcctccatcgcctctctccacggaaatctcagcacaccaatcatgggacttatctctctttactttcaatattttctcactttctaatcctatccttctaattttatttagatgtcaatcattgtgaataggattatgagcctgcttagttgcattggactccaattgggtgaattggctaagaaatttcgacatggtgcattcatataattcgactgcaacctctataaagctggaaaacatgaatggtaagacctatctggatttgtgatattatatactgtaaagttgaagattgggggtttagtttctgttgttacagtacgctaactggaaatcggtgtactatacaacgtaaaatcacaattcaaaccgaaaactttatacacagtgagcagagcaatagttcataacagttaaggttttgacatgttagttttcttttatgtgatataagtagagaaacttggcatcttgtccaaacgcctcagtatattttctgccatctgccttgtgttaccatctccacgatggaaggcactaaccaacatacctgacaacatcctatcttgtgatatttcgctggcatacttatctccgcctctaataatgaacttgtcaatcatccaaaatgctttctgcaatagagactctttcttgtgttccttgactgcatttagaattagttgtactgcattcatttcactcagcatgcttaaactcttctccacttcgaccttgtcatctaatagcgtgcatatagcagctaatgctgactccactacctccactttatcactctgcaaacatgctagaagctttgtgattgcatttgcttcaaccaagcaaaatgtgttttttgcagaacatacgcctctgtggattgcacagatctctatctgcttctttttggatgaacggagggagaaagacctaggcatactcagtgatcccatgaattttgtgctcctaggttggggtggcctcgataaagtcatagttgtagatgatagattttctagtccagttgctgataacctttgaacttcgtcgcttgatgttttcatcaataaatcaacaaacactgatgtcaaatcgtggtttctggctaggtacatcatttggggctcgtacagtgtagttgtgaatctcactaagatgccaacgagaccttccaagaaatcagttgcatacctgcttgttcgtgctccacttctttgaatcagatggattgcatgcagaatttcagacactatgctctcgttgaccagtgctaaattaagagtcagattctgatgaggaagtttagcaagtaacttggctgaaacagcatgcttttctgttatttgatttgcttctactgggcactggataagattctctggctgacctctagttttacatagtctctctgatagcgtgtgaccgatgtagggggtaagggctattagaagttttaatgctccaacccctaattcgtcatgaggattgttgatgagttctatcatggcaaagcttgcgtcggtttctttgatcactgagacgattgttgccatcgctctaggtgatttggacaaggataggagaatcctgatcaaatcaatgttaagatcatctgggcttgagttcttgagcatgtggatgatgttgtatacaaagtaatccgagcctaatgtgtggccatgagtattcacctcaaaggtctcatgttccagcccagattccagtatgtttgcaagtattgtagcagcttcgttcctggagttcatcagatcactaaacactcgcttcgtgaacatttcttcgaccatgatcttgatgatgccgacctctaccagtatcttgttgttggggtgatacaatgaaatatgagcaagagctttgaaggcggctcttctagcgtcaatattttcactttgcaccagcccaatgagcgcagggcaagccttctcagctacataagtttttttctcatgtccaatatcaatttccacaaggtacgcagccattgccacctgagtctcctcactccctgccatatatcattcggaagtaaactgatattaatcaacatcaattcattgtttatcatttcgctccaggtaatgcttgtatagcaactatgcttcataaactttggagagaaaagcagtaatgaattaccttctgctagatggcccagaagaggttccaatagtccactctctgccatttgcttgatgttctcaggacacttctctaaatttcttaagatttggtctgatgtttcagatgcaaaggaatccaactccctgttatactttgcggtaactaacattagtatcgcccctctagcagtcccaatcttctcacatgcatgttgggattttgaaagctcaagcagtaaggcttgtgctgcatgtcttacaggctggtgactgcttcccaaaagtttgattacgcatgacatagttattgtcttcacaatcatttcctgtaagacaactttgaaatataaaagtctattgaaacaagaagtagaactgctgtgtctagctaggacaaataatcacagcagcgcatatcgtctaaggtagtgtgctattgcataataggtatgtgaaagagatccaacctttccgtcatcagtttcttcatctgccagtgtccttaagaactttagtagttcaaacctcacatctttacttctgtacgtcaggtatctatcaagcagctgaatgatcccagcttcacggacttgtaccttgttgtactctttcccttcacaggtcatttgcagatctcttaacgcgtcgatgaccatactttctgaaccgcctaaggataaagctgcatgagccactttgattcttgctgcctcgttacgtactttccattcctgaatgatggttttcaagacaacatttgcacttaattcagtggtcaacttttgacccgtaactggacagttgatctcatcggagtttccaaaactgtcaaaccactctattactgcttgtctttcgcaggttactcctgtttctgtggtgactggatcttccattatctctttggtcaacgggcagatgaaagcttggtatggaggttccatgaactgtgtcacctgtggtaacattgacaatgattcactaagatttccatactttctctggctgctagcattcgagctctggcttgggatatctggtatttcggtactttgtgattgtgatttactgagattcccatgctttctctggctgctaacatttgtgctctggcttgggatatctggtatttcggttactagtgattgtgattcactatgatttccatgctttctctggcggctaacatctgtgctcttgcttgggatatctggtatatcagtcatttgtgattgtgattcactatacatcatgtaactttcataggaaaattcaggatcagtgggatagaggtcttcctccatttgctcagacacaatatccggtgtatgctttgcagaaatcttctgctgcccattgtttatcatctcacttttactaccatctccaatggtagcattttgcatctcatttgaaagagactgaataacaactcctatatattcttcctcgtcgaatgttgattcaggtatggactgcaaagtttcacccatctgctttacaacgccttcaaaacctgcctcaatgcttctcagatcagtagttgattcggcttcgttgctttcttgagatttctcaaccagtttcttggcaacatctacactatcggatagtgattcaaaaatatcaattgaacatatgacgttgctctctgctgtctgtatctccattaacacaactgaaactcgataaaagtagcaagcgcattcgaggaacctctctgtttctgcttgtaaggactccaaggatgtgattacctcagaaatggacctcaacaacgatccaattagtgtatcacttgtgcctatatcttcttcttgactctgagatcacataaatagggagaaaggtgagatttcgttggtttgagaatttgatgattcgaaagatacgatcaagaatttttttgaaggtgcaaaaggaaaaaaacaagagaagattgaagaaagtcttaccgacatcccatttgttcaaagctggtcttgtcttactctgcttaccaagtctccaactgtaacttcatcaagcagaagacttgaaggacacacttggtcctctgtttcagagaagttggaacccactaaaggtaaatttgttgctctgacgatgattgatgagacgactttttaggaggaagtggggacacagtaaaattccataggactatgtaaagaagttgaaggagtcaaatcagaaactctgattcagagtacttactttgttaagccatataaagccccaaacattttctttacgaaaacatgtgtttggattttgttgactttgtttgtttcttcttgcactatctctctgcagattggtcagaccacaaaccaaaaggtgaatgaatgatgatggttagagaaagttgatctgaaacttcttgtggtttgatttttgacattttcctgatatttaaatgtagtttgtttaaataatagaaggattcggtaggtactgtccaatgtcactatcttgctttcttttatgggtaatttatttaaagataaaatcttgaattggtaaaaagatatgccattggatcacattgacttgtatatatattttgcaatgtttgttctggtcttgcggaaatatatgatcaagtcgttggttcttacttggctgttgggagtacaatatatacatatttgacattactatatatcaaaagatatagagttttcaattcattaccaattgttttgagttgtgcaagtccataatttattacactttttacattgcttgccttgaactcactttgaaagcatagaaagagataacttttctctctgttttccatcagaggattttagagatactatccgtagctttctcacatatgatcatctctctagctttcggtaatgtacatagtccatctaaccaaatgatgtatctcataatatcaggagccacaccatcagaaaccatctgtctgaaaacttttttagcataatcacattcgccaccatgaaaaaaaaaaaaacatgacattctctcaggaagatactttgcttctacaagaacagttaaaaagaggaacacaagacaaaaacaagctgacattctttccatatctctctctagctacctctcaaagatttcttttaagacaaaaatcatcaatttataaaagctctgtcattttcacaactcaaaacttattagattctaaagaatgatgcatctaatagctaattaacacttaaaaaggtttttttttttataaaatatttgcatgtaacagacaggagaggactcagattcgccttttctcagacaaattagaggaaacagtactcatccgccatggctgctaactaagttttatccttatatagccctgccatgaaagagagtgttaccacaatgtctggtctattgacttcttaagaatcatcattgtttcccaataagaagaagaagaagaagaaacagaaaacaaggaagatcagaaatggtggcggtgatggcgatggtgatggtggagatgattcatcaccactttttaaagtggttcatcaagaatgattttgaatcatcggcgccgcttccaccggaagccaaaataacctccgggagcagagcctcatacttaaactaatgacagcgaaaccctaaaaaatcaatccttttggggaaatttatagtacccaatttccagtttcaccctcagatgattattcaacaacacagaccgatataagggtattttcgtcattcaaacgaagaatacaaaatgttatataaacgccagtaacggttaactataccggtttacgttttccctcattgttgacaaagctaatcttcgagctctgtatcttgtgatgatctatattgtctaatctttaacattcacatggtggctagattcagcctttattgatacagcaatacatgtataaagtcctttcttccttgtattggtttattcataacgagacatcctattacatcagaatgcaagatcattgaccaagggtttcctctagaatccagcaatattgatcgtgcgtttgcagctgctagcttatactacatctatccaggttcagagaattgcttcgatattgataaccaaactgatcctcatgagtctatctgttcctttttgttaattaattgaacagttcacaacaatagacaaaatcagttaatattcaacttactaatggatcaatgatactatcagatgaaaaaaggcttgcaccgagatggtaatgccaataacctgttcgaaccagaacatgtttccaccatttgaaaatgatgacaaaggagacccaagaatactgtctgaagataacaaacttgagttttaaaggattcattagaaacagtaaaatattcaaacatatttgttatgaatacttatgatgaaacaaaagacacggagtcacggacacgaaacattgttggaccgggagtggctgtgatcatgttcatgaaatatattaaacacaataagacactaaacaagaagcggggatagctcagttgggagagcgtgacactgaagatctgaaggtcgcgtgttcgatccacgctcaccgcattttttaatttttctttttcgcaccaaattaaaaaaataaaaaataaaaatggagataggaggatgctaaacagaacgagtaaattaagttttgttctcatatttagcacatcatctgcaaagttccaaaaatagcataaattttgtatatataaaaattattgagaattctcataaataatatcgtatcaagttttttggacaaaaataacactcaaaagttttttgaacaaaaatagcactcaaattacatagaaggaaagtgaatgtagagacaagaataaagaagatgaagcgacggagacaacagcggtgaataaagccaggatgcaagtttattgaacgaaaataacactcaaaagttttttgaacaaaaatagcactcaaattatatagaaagaaagtgaaagtagagacaagaataaggaagatgaagcgacgaagacaacaacggtgaagaaagccaggatgggggaagcgatgaagacagtagccgtgatgaaagggaagaggaagctactaagaaataagagtttcttgtttcatctgaaagtccaaactgtttagttattttattttaaaattccttcaaagctctctaagaagagtctaggttagactatttaacttcactttgtttcttttacaaaatatatctagctttactttggactttaaatctttaattaaaaaaaaacaaaaaactatatgtttatctttttagctatttctgctaagttgctgctacatatctcttcgattccagcaccgatttgtttctcttgaaaatcacatgtctttgctccagcttacttgctttcataatcttttttttttgttctttctttcctcagattttccatggttaaaatgttttagttttcctatcatcagattattatcaagtaaaaaatgagattatgaacaccaccaatcaatattattgtatattttactgagtttgttgtatccacatttttactaagtcaccaacccagtgagactccacagtttaccaagttacctcaattactactctcttgtacatgacaactgacatcaatactttctaggttttcaatgtaatcctgctcatcagatccctttactaaaattttaatatgttttattgctatgtcacacgacagcttattgatatattcatatgttgtcttcgagttttaacatagcgtataaaacctaattacgtggacatgatctttgattcataagcgcatataggaggaacttaatcctaacaaccataagtagttagagcatcattattggtagttgcttagcttaattcttaggaaattttggttacaaatttagtgtttttaatcatatatttgttaagagagtctcttatataagagacaaattgaagtattcttagcttttgttttaaaaattttaaaatcaattaataaaaaattctaagaactaaattaagactaacctaagaaactaccattaatgatgctcttaggtaactttaaaaacagcatagaaataaggggttgcttctgaattttcttcaaaagctttttccggataaagaaactttatattttcttgcacctcttaataaattgatccccaagtaaaagagcagtgtttgattgtctttgttctcttctgtcttgaaaagaaaattagggttttaaaacaatgtctcagctcttgtgccgaatctcgaagctttcaacatcccggaacaggatcctctgtttccgacggtccgaattctctacggtcacggcggaggcaacgacaccttatcttctcctcggcagcgatcttgtcggaaaatctccttgcgatgggaaagtcgtcaactttaacctctacgacccaaggaagcaagagcaagtgaagatcgaaaacaagattctatcaaaggaagtctacgaatcccacaagttaggatcctcacgaggatggttagctttgttgaacaagaaagattcaacagtgcgtctcactaacatcttaaacccttctaagaaaatcatatctttaccttcactaaccagagacaaatatgaatcccatgttaatgtctctgtctcatcttcaaatgaagaagactgtgtggtcgccgtcaagttttacgggtcacgagttagtctttgtcgacctggtgactccgagtggactcgcattgacgtgccttgtccatctttccattcttctaccgtcatttactcggagagagaccggagattttacttgaacaattgtaaccctgactataccggtccgaccgatttcacaccgaaatccggtttacacactccggttagtggctacaagagattcctcttctctaactttcttgaagaaatgccagagttggagaacgaaaggcgtctctctcgtttcaggatccaacaacaactagtcgagtcagcttcgggccaatccttcatcgttgcatggtaataagaacccgtgagtttgtgttgtttataagggattgaagatgatataatctgtgttgttgtctaggtttgttgagagtcttacggacaaaggagaagttgcgacatggggagacacacgttacaataacaacaaagacctttgcaagaagacccacaagatcatggtgattaggcaagacgaagagcaagggattggtccttacaccgatgacattggcgatctctgcattttcttgggcgagaatgaatctttctgtctctctgctaaggacttccctggtcttaaccctaactcagtctactttgccggccatggttccggttatggcatatgggatctcgcctcttgcaccattcgttatctctctgactctactccaccacccggtcgcatgttttggcttcctcccacaatatcccaataggagagaagatatcttgtcttccaattcttgcattaattaatatacgctgtgttttgtattcatcgctatctctatcttttattatcttgttgatttggtgttttgaacatctttttacaacttattggattttgaagtacttattgtcctttagaagcctaagatacttttcttgcttttcaagaaagtgtctctgttagtcattttactttaatttgaatctgttttgtctaatgtgcttgctctccttctagagtatatagttgcaatggataacttgcgttaacaaacgacccaactctcaagccatttggtttctgcataacactagtcgtttatgtcatgtatttacttggtcggcagttaaaacctcttttaaaatgtaaagatggctcaacattaacattcagcagcaaaaaatgaaaaagtaaaaaaaaaaaactcattcctggtttcattatctatctttttgtttttgatagtacatagggtttttgatagtactatgaaagacaaaacgagagataatgtatatggattatctttgttatttcaagttcttatagtgtagaagagaatgtaaagtttaggtattctgttttaagtttaagttagtcttaaatattttccctgattgcattatctctcgttttgtctttcatagtatatatgcattgtctttcttagaattttttatcaaacaaaaatattctgatgtttaagttttctatttcagattttgcgttgtattcaaacaactcatatgagtagatagagtttggcgaatccattgtgtcgtgttatggcctattacatttacatgtatgaaattgtaggtcaagacttatataatgaacggataattaaccccgaataatcccaaaagtaggaaaaaaatgtctttttagaattttaaagctaaaagttaaaaaatgcggtgagcgtggatcgaacacgcgaccttcagatcttcagtctgacgctctcccaactgagctatccccgcttgatgcttattcgcttatgtaatgtaataaatcagttaatagttttaaattgtatcaaacttagattcaaagtacccaaattagtgtgttttttgggaattgttacatggtttgcttcaattgcttggactatcatttcttatgcgtacaatggtgtaggtgaataagccactctttaagctgtcaaagtagattcatgtttcatatgagatatttgttgcttcaattagcctctcttaggagcaaactttaacgtcttgaatggtttaattttctacaacgaactcgaatagtttctgctgcaattcttccttattaactaagtgaccttagtgtgacaaaaaaggattcatgaacttgttttgcgatattggttgtttcgataaagagactactgttactatctttcctagactactaccttactatcttctcttatgtatgccatagtataggaatgtaagagagatactcatcaaattcatttgtcaatatagtacaagttgtaaatttcctctgatttcttctttcttttaatgtcccaacatgaagatgattttcacttatctaaggttttttcattggccagcaaatcatcacattgttctgtatacttcatggttaagattgtttaaagatcatctctttccagtttgtaagtgagctttgaaggtgttgatcgtaataaacatgaaactaaaaaactttcaaagtgtaaccacctcagcagcgaaccctctgtctgtagcagagtatcttaagacaatcaattttcttgcacgagacagacagacttcagattatcttaagacatatagaaggacttcgcaataacaaagagacggagacggagacgatcccttgtttctcgaatgttgagaaagactctaactttaatctcactaagaagacccttctcttcaattccctctaaaaccctaaccccacaccaaaagtcttcctttgaatcaactctccaccattccctaatcacccacgacactgatcaagcatggaaggtcttccgatccttcgctgccgcttcttctctcccggacaagcgtctcctcaattctctcatcacccacttgtcctccttccacaacacagatcaaaacacctccctcaggcacagactcaagcgtgcctttgtttccacgacttatgtaatcgagaaagatccgattttgcttgagtttgagaccgtccgtacggttctcgagtcgatgaaactagcgaaagcttccgggccagcattggctttggtggagtgtatgtttaaaaacaggtactttgttccttttgatctctggggggatttacttatcgatgtctgtcgtgaaaatggaagcttggctgcgtttcttaaggtgtttagggaaagttgtagaattgcagtagatgagaagcttgattttatgaaaccggatttggtagcgagtaatgcagctcttgaagcgtgttgtaggcagatggaatctttggctgatgctgagaatctgattgaatctatggatgttttaggtgtgaagcctgatgaattgagctttgggtttcttgcttatttgtatgcgaggaaggggcttcgagagaagattagtgagcttgaggatttgatggatggtttagggtttgcaagtagaagaattctttattccagtatgatcagtggatatgttaagagtggtgatttagatagtgcttctgatgttatactgtgtagtcttaaaggagttggagaagcctcgagtttcagtgaggaaacgtactgtgaattggttagagggttcatagagagtaaaagcgttgagagtttagcgaaactgatcatcgaagctcagaagttggaatctatgtccactgatgttggcggatcagtggggtttggaatcgtaaatgcttgtgtcaagctcggattttcgggtaaaagtattctcgatgaattgaatgctcagggaggatctggagggattggtgtgtatgtgccgatcttgaaggcttattgcaaagaaggcagaacatctgaagctactcagcttgttacagagatcagcagctctgggcttcaattagacgttgagacctataacactatgatcgaagcttccatgacgaaacatgatttcctatctgctcttacattgtttagggatatgagagaaacaagagtggcggatctgaaaagatgctacttaacaataatgactggtctccttgagaatcagagacctgagttaatggcagagtttgtggaggaagttatggaagatccacgcgtagaagtgaagtcccatgattggaattcgattatccatgccttttgtaaatctggtcgcctaggagatgcaaagagtacattcagaaggatgactttccttcagtatgagccgaataaccagacatacttgtcgttgatcaatggatacgtgagctgcgagaagtacttcgaggtggtggttatatggaaagagttcaaagacaagaaagcaaaactggagcatgctcttgcggatgcgttcttgaatgcattggtcaaaggaggcttctttggcacggcgttgcaagtgatagagaaatgtcaggagatgaagatattcgtggataagtggaggtataaagcaacgttcatggagactcaaaagaatctcagattgccaaagttgaggaagaggaagatgaagaaaattgagtttcttgatgcctttaagaattgggctcgtattaccacatgaaagccctctcaataggccaatattcattaacagataagagtttataatcatttgttttttcttttaatgttttccctataaaagattgtttctgtatgcttagttcaattctttgaatgttcaaaaattctttcttggataatgaacattgttcaagttcatatattattatataaaatgcattttagagtctataataaattacaagtcaatcaaaaaagagtgtctactaagaccatttaaatgattatcctttagcacccgttttcagttcctacaagactgcatgtatctcttggtaattttgtgtggtcgataagaaactgctagtaatccggagtgccacagtcactggttcgataacccgatccatcaattcgatccaacgccttccctcctgccaagctttgaaacactctttctgtgtatatttacaagtaacccgaagcccacctctaagttgaggttaaccatcaacattccttattaagaatcttttcccctttgatcaatgtggctgatgtattggcctgaagaagcaaacttactctgtcctgaatgttagatgtggagtattggagcttccagtatttaagtaacctgaatgtgctgcagctcagttgaagaagtaagtcgactctaggaccttcctcagatcaaagtcgcctcgttctggtaatggcggaaaacttatgtctgggaaggacttctggaaactctccaacaactatcaacacaaagacaaaccctccatcatgagtttagttataataaaacaaagaaagaaagtgtaatgttggtaattgtattccccttgaaagatgtaataagtagattcttttacgttttctaagattggcttttcgtagagctcgacaaacttttctctgagtattgtgttcattacgtcaacatcacaggcatgcgtccagaacgaatcatgcacccctacaaattttaaatgggtatgaagagtaagaatctagaatgaaaaaatcaagatcagttagatgcatacggaaaggctaaagctgacctgcgaaactcaagccggccctgttgcaggcaactgctgtcatcatcatgtgagacccatcaagagaatgtataaaatttggtgcaaaagcagtcatctgcctcctcgccatgacctgaagcaagaatacagaatgtggtgcagaaagatgagacttttctgcttaaaactcatcaaatctacccaaatgctacattacaataagatgtaggctgaaccctactctttctccaaataagaatgtctagccatatttaccaattaatgaaaaatatggagaaaagttatatggtgaatgaaatttggttgggttaccttatcagtctcacggcttagagttaacacctgaagggtagtcttaacctgccaaaattgatgcctctcaaattcagtgatattcaagagagtcgctatccatttctttcagctgatcatttgtgttccgtcatttataaaagaagttaagagcattaccaaatgtcttccaggctttcgataaggctgtacaactggaagtccaagaggagtcgtccaacaaactgcattgttttctgaagctattatctgtccaccacagaaaacaaatctcaatgtcgtaaccatttgtcaagtgaaaattccttcctaacttatgatttcttaagcagagcatcatggatataagcactgacctttgcacaatcaccaaaccaactcttgatagctcttgcagcttcaaacatctcttccaatgctttcaaagtgatctagaaacagaaccaataaaggagtgaatcttcgatgccaaatccaataattaattgcagattaaaaatttgtaaccatagaaagcatatcgttgcctaatcaagcaagtaaattatcatttccttacttttgctgcataacacgatgcatgaaaagtcagtgaatcgtcctcaaaggtaccacgttcttttaacctcttctttatttggtcacgtgcgccagaataagtaacaccatacactgatgtcatgacagtctgtttgaccagctttctgtcaacctaaagaatttcaatagtagagtcttgttgtcagataggatgatcacaaacaagtattaaattgacacatagtagcagtatatctgatccttatattgaagggataagaataggctgtcaggtaacatgtttggcagaaagtggccaatataacaagcaagaggtgtgaaaacctggtcgagcatgagtttggcatatgtggcatttggaaatgtttcgggatcttcctctgcatcttgctgcatgatcttgagaaccctgatttaattaaaccaagttaaaatcctgtctgattagagtgttactatagccagagagataagggaatataaaaaatagataaagtacctagccgcaatttctgtataaacatctgccggcttttcacctgtaacaaggttgacagcatctgctcccaactataaacagaaccaatttgaaagaaatgaatcagagaaccttgaggagaaatacatttgcctatgctcgaaaggatgcatacaaaaaaagaaattataggtactgtaaaactaatggcataccttatccctcccaagagcagcatagtgttgtaaaccattacatgaaccatccttgcaatagaaattaatacaggaaagtaagattatctacttaaagagcatagatgatgatgataaattcggagcaacaaaggcacctatataactttcattttgcaagaatgtcacaaaagttgctcatgtacaagtatggataaaatctagcgagtacctggtggatggggatatgggatattgcagcttcaggaaaggggcttctcaaggcttctgaaagattaatgcaagcagccaaacattgaaagggatcctctgcgttaagccaccatctttttccttcaagaggtctatcagaagaatcaaatatatcttccaagtgactctcagtaaacgcaatcctatcctcataagccagcttatcgactccaccagcatataagtttgctatatgtatcttcagccaacgcaaccctgatttcccaagaggctttccctcacaaaactcaaggatgcctcggcagagatcagacccgagatggttaagatatggatgtatgggatatgctcgcccacgaaaatcaacgttgtgagggtagtagaaaccttcctcatccttcattttacgtgccacctgatcaatcaattgaaagcacaacgatggttttatacatcacagcagcaaaaaagagtgcaaaaagaagtcttctcttacctcgagtttgagctctatatcacacctttgtgaatgtctctcattattttgcttaattgcttttttggattcccatctccaatttttaaatttttcttggtcttccctttccggctcttctggaatgggtaccttttgtagtttataaagaggtgagaaaaaatcaaaatttctaaaagagaagtaggaatcaaaattacttccttcttctgaagaagatggctagcggatgggtgaataagaactacaagtagatccgcaaagaagagagggagagatcttacatcttcacggtcaaccagaccaccaatgcgacctccattagcccagattctgtccaccaaacttaacacctttttgtttatcttccatttagtgtttcctagagtatctaaagcctgattaaacaaaaggaatcacatgaacttatctgttaataacaatattcataatttcgcaactcctatctgcttttaagcatccaagaaatgactaagctcaagcaatattaactcgcaatacaggtcaagggactcagacctcatatactggctccagttgctcctttggagttcgtttcataacagtgcgttgttgtttagctccatgtgttctcatgacgtacgaaggcaagaaaaaatgagccccttgatcatacctgtaaaatactgtcaagttacatagcaattctagaaacatacttgagcaaactgtagatatcacctgtatgacggctacacaagaaagaatatctatatagccagagtaaggaaggaacaatataagtcctaattattggtgaaaagatctcataccctgtccagttctggggaggtattagcattggcaagtagggaatgaccatatgtctagcctgtttaaaacaaaggaaaattgtgagaaaggagtagggagatctatagtggtaaaagattgttatgacccaaacattacaaaggtacaggataaaagatcagtaaaaacatagtccacgattctgcttactgatttgtcaaggccctttaggaccaaaggatcgcattcgatgcaaccatatctcctgctcgtttttctgaagaagaatacaatagaatgtaaataaacagcagatacaaggagagggagagacagagacagatacatgtgaatgagcataaacagaaattcaagactcttacgtattttctaatgtgacagttctgaaattttgcttaaaagcaggtcggatgtcaggtggaccatcatcaaactgttcagctggaggttgtatatatgcattttccatcagcagctgaatcaaacgtgcgccgacctagaagcacaagagtcaatattattaaatcacagagacgagaaaaaaaaagagaaggaaaataagaactattataaagctctgtgcattgacaagggtggaagtataaacaaaccttcacttgagcctcttgaccccatggcttgaatgagtcatgtttcctcactaatgcttttacttgcctcaacttatttttttccatcagtacagtaacttgtttcctcgccttttccgtttctttggccacaatttcttctgaaacattctcagcttctgtattgatcgtcttgtcagttgcattttttttattctttttctgcaaaaaactgttgatcctgacctgatccagtaacaaaatacacaaaccatcaaaccaatatacacttcataccccatggggacaaggcaatatgtatcaatgacacattcctagattcacacatcatgaaatagcatcaaaagcaacaagagaaattaaaacccacctcctgctcaacagcttccccgatctgagtagcagcattcactagcttaacaatgccaacgccttccgcattagtcatcaacaatcccatcatcttatgcatagtgataacagccatcttatcagccggtaactgctccataaaaggcgcatacggaatcttccctttcttgattttaaaagtatcaagatcatcttgaatagcattacgcacaggctcaaaccagcctagaaacaaagacttcatataaggtaaattcggtgcaagcttctgctcacacatatcagctagaatctctctacactctctcgctgctctttcccattcttcagtctccattttcacctgtctctgcttcagcatatagaacttctgtgctcccattcccgcaatgactctctttggcggtatagctgcaagcctagcttttttacggattctctcagtttctttctccatttccgttatcaattcattaacttcatcagacccagaagactcatcttcaggatcagtcgaatcaatagcttgcgcagctgtagcatacccttcaaacacataacattgaccatgacgaaacgagcttaatccacccatttcgttgactggatttatagataaaccatttctaacgccactgagattaacagaagacagaatcccacggactctattcactggataatgagtaccggaggagctagaatcagataaaaacttaacctttctcaatgaagctcttcccagaatgttcctccacattttttgaatcgtttttgtgatcgccacgaaatggtaatagtggctgcttcagatagtttactgcctccacgagcacaatctcgggctatgtagctacttgattttgtagagttattaatacaaacatagaaatcaaagagttcagattcgaagaacagattaaaaacaagacttgggtgaagagaagagagatctggagaaaagagaaggcgccgtgaagtacaaacacagccgccgaaataaacccttcataaaacctttggtttctgcttcacatttcatggatcttgtcaaacccgacccgcttatcagatccgttacgctcttatttgggctcaaagcccatattctggcacgagttatacattaccatgataaatatatacctaattaacattacaacaacaaatcagagtggcgcagcggaagcgtggtgggcccataacccacaggtcccaggatcgaaacctggctctgatagtattgttactcttttttttttttttgtaacttttgggcttagcccatgtctgataaattcgaataaggtatagtattgttttggaaacataggcatatgttacttctttttttcctttgtaaagtttgggtttggcccaagtctgataattccattcggccctttatagtattgttttggaaacatagccatatgtcaccgttcgattagaaacaaacatagtacgtgaaaattaacagatcagaaagagaccacgtgcatcacgtgaccaccttaaatctgataggttagaatctcgtcttatcacgtgaatcccacgtgtcatcacaagctacggttcatttagaggcctaaccgggtaatcacatcaagtcgtacacgtctccaaatcacgaaactgacggacaaaagctcaagtaaactcacgtagtctctcccacagctaactagaactcagccgagtcacgaggcacccaaaaaacaaaaaacaaataagcaacaaaaaagagctcgtcgacggcaaaagttgaaaataaaacaataaacagtcgaaattctccggcgaagatgagaaccggaaaaggaaatcaagaggaagaagattacggagaagaagactttaactctaaacgtgaaggtccttcttccaacactactgttcatagcaacagaggtaaattgttcgatttgggagacttttgaatttttcttagttgttgtttcgtcaatttgtgttttggttggagctattgttgatatgtatcgagatggatttgaatagtttgggattagatttttctaagttttgtctctgtgtgattcggtgtttgattttgaaagcagattcaaaggaaaatgataaagctagtgcgatacgttctaaacattcggtcactgagcaacgtagaagaagcaaaatcaatgaaaggtatgttgatataaagtgaggatttcaaactttttggattgttgtttttgtgagaacttgagattaggagtaaacgcgacattctttgttttgatatctgaatcaaaattcaattactttgctaacaaaatcataagaatacttaggacttgtgtttgggaattttgctctgcttcagttttgtggtgtttgatataggacttagttacattataattattgttcttgttctgagtgctgaattcataaatctcttctcagatttcagatattgagagaactaattcccaacagtgaacaaaaacgtgacactgcttcattccttttagaggtatgtcatggtatttgatgatgctttgtgcgaatatcctgtcttttagatgttgttagcttaataccgctattccattctaggtgatagattatgttcagtatttacaagagaaggtgcaaaagtatgaaggatcgtatccaggttggagtcaggaaccaacaaagttgacgccatgggtaaagttttgagcttcttcttatgtcggtttctcaatgagtttctgtgattgtagattctgagtatgtttttgcacccgcaaggctttctttgtgtgacttttagctgaaggttatgttttcttgattggaacagaggaataatcattggcgagttcaaagtttggggaaccacccagtagctataaataatggatctggtccagggataccttttcctggaaagtttgaagacaacactgtgacttcgacacctgcaattattgcagaaccgcaaatcccgattgaatctgacaaagcaagagctataaccggcatatcgattgaaagtcaacctgagttagacgacaaaggattaccaccactacaaccaattcttccaatggtacaaggcgaacaagctaatgaatgtcctgcaactagtgatgggctaggccaaagtaatgacctggttattgaaggtggaaccattagcatctctagtgcctactcgcatgagtgagtctgatcttctaagtcttcctcgtttctgttactgtgctgccattgatgtgttcgcttctaccctttttttttaactgcattgtgtactaatcttgtgagacattaattctgaaatggccaggttattgagctcattaacacaagcactccagaatgcaggcattgatctgtcgcaagcaaagctttctgtgcagatcgatcttgggaagcgagccaatcaaggtctaactcatgaagagccatcaagtaaggtaaatagttggttcgaaatgcttcatacttagttttgtaacaatagccatatatcatgatgttgatacatttttctatacagaatccattatcatatgatacgcaaggaagggattcaagcgttgaggaagaatctgaacattctcacaagcggatgaaaacactgtgacatttctctctcaggctccacggcgctggaatatataaatgtattgacagattccttgtatcgtgtacattgttcggcttctaggggttcctatagtactcgttaagataaactttggttagtagattctgcgtttttttgtggttctgagtttgtatcatcttctgcatcattcatgtaacctatcaaatatgatctcttgtggtttcaagttattgcatcatttttttccgatttgatcttccttttttgttgagagagcgagatcaaaggctagcaatctcttaaccttaaagtgaaagactattataaaatcatttgatgctaaaccaaagatgatgtgatgcttttatctattgttgtgatgacccataactttgagaagaaaagcataatcaaaggcagtctcttcgcattgagcatagcgaccaccttcaccaaaatgccctccgttcatatttgttttcagaatcacagctcgggagcagtcgtggcacgtactatcccttatcttagccacccattttgcaccttcccatactccaaccctgacccaataacacacgcaaactatgatccaaagattcttacttaaaacaaaaaagagatatgggtttaagggttcttttgtgaagctagcttgccttgagtcatgaaacgaagtagtgacaagcatggacggatagcaaacatcttttcgtatcttatcatatggagaatagctaaggatcgatccgaagtcagtttggttgtctgggttcccgaattcttcatggtccaggagtgtgagaggtaaatttggatccgataatgtgtttaatacatctacaaaaggaacctgcccaaatggtacacaccttaatgatttgagcttttgattattctggacacaacttaatgcatttgctatgccataatattcttaccttcaaaatcacagcttgaaatagactcgggtgcatattcatagctgcagctggaagaatagctcctgcactgtacccaacagcagcaagatgatgtctatgcacatagcctttttcgactagatatttagcactgtatatgaaatcttggattgaattttgtttcaacgatctagttccggatttgtgccatgaaaactccccactgcctcctcccctgaggccaaaataaaactcttatagaagcacattcaaatcaaccactattataccaagtgatgtcaacttgaagcaaatgataattgaatgctttggttatgtttagtgactgacctcacatcagcaaaagcaatcacccaaccacgatcaagcatactcaatcgatttgtgcaccagcttttgtccaaaacttctccataagcgccataacctatcaacattcccggtgactcactcttcttccatgcttctcgtgaatacagaattgtaagagggacttcaactccgtcatgtgaagaaacttcttgtctttcacaaacatatgtatcagataagtcctcccatttaggcattcgagaatctaactgaccatcttctccctcgctggttctatcattaagttgaccgttattctctgtagagcgatctgctgtgtaccatggcttactactatcagaattatctacaacccctccctcctgctgcacaattgagaacaatcttcttgacacgtcatagtcaacgatagtgtcaggaatctgcaattccaacaataacagtaagatattcagagaaagtatcagagtagaaagaaaaattcaaatgcaaataaactatgttatggttcaaagctaaaacaaatagagaaacccgtttctttatttaccacaggagacgaaagcaccactcggtatatagagctctggaagtcgtggtttgaaccaggggcaacactgcatgaatcaactggaagtggaaaataccagggaacaagatcatccatatgctgcacaaatgaaacatactttagtgaaaatgtatgaacgcaaagcgacagagaaaaaacatacaactgcaatactaatcagaaataccttcgtatttgcttttatgggcatatcaatggaacagagcataggtaagcctttcttattaagataaagcactaagtagtcattgaacatgtccatatcttgtataaccacatcatcatctggacggaaaacagtctgccagtcagatgcttcaatttcctctactaagcatctagtcaaatagtagccttcaccagaccactcactaattgcatttgagggagaatttgtaagaatgtaaaagaacccattgtgatgttcaagaaaacactgcacgccaggaactcgttcgcgagttctttgcaaaccagccattggcttatcagcatttacaatataaacctgaaaacaagataactcagcttgagcctaaagtatatcgatgatagacactaagaaaacaaaaacaaaaatgcagttgaaagaggtaaattcctcggatgaagtccttgagtttgaattgatagtaacaaacttgccatcttttgtggtcgttatgtctacacagaaactggaatctctttcggtaaacactacggcatcatctctcccatctgattcaacatttgtgacaacaaccctgcaaaaactagtcgcagttgaacaaacactctccaagtttaataaaattaaaaagctatctatctactagtatgagtcactgtatttgcctgtgaggtctttggttttcatctgtaacagtgtaaaacaaggtgattccatctaaagcccatgccaagctaacaactccatcaacttccaacctcggaactaaccgatcagttcttaaatccttaatctggagaatgaaacgctcacctccttcgggatcaaccgtgtacgccagatagttatgatcaggtgaaacccgacaaactccaacatgaacataacctgaagtagtacacataacacttgcttagagactgacgatgactctaaaactaacaatgaaacattatactaaaggaatgaacttttaccaaactgctctgcaatttgattccagtcaagcacaacttcttcttcttctccacgaaaaagaccagagagccaatttgttttacccttctccaatctcctacatagaagaggatactcttttcctttgggtatgtattgtctatataacctgctcaatagacaacttaaaccaaatcaatcaaaaagctcactcctttatactcgtatcagagaaagttacaagattagagagatgaaccattgtccccaacgctcaggaggagtgaaaatctcttctggaatacgagttttcatctcggagaataaatcacgcctcagggtttctgtgtcagccatgaaagcttgagagtatgagttctcacgcttgaggaagtcgacgaaatcggtgtcgtccgtattcttcatccaatggaaaggatcttgtcttgtgatcccatgagatgagattgcgaatgggatcttctttggaaccggaggagcttccgttggaacagagagtgatgatgttcgtccaacaaaacatttcgtcgagaaagacaaaactgatgatattgtcgccggcttgtaacgccggagaagatatgttactgccattagcaaactttaacctctccagcgactaatatttatgtcaaagtttcgctttttaggataattttgtaatcaaagtctgtttttttataatttgcgaattcgaatgaataaaatgtgtcttcatcttttgcatcaaaagctatacactgaatcactgatgatgaaacagatcatataccatcctcatttacttcccaacaattgggtatgtaacaaaacttaataatatttctaattttttgctgcatttgattctttctcttcctcaacatcctgcaaacacgtgaaggcagatttggattaaaccaagatgttctgttgttgtatgttttaaagaactgagagaataatcaaacgttttcacttacagagttgccaatcttgtcaaagtcatcatcacccaggcttcctccatcatcaccatcaccatcatctgcaagttttacgattatacagacaaaatcaggatttaagtcatagctaaaacttgggaagctacatcaagtcaaggtgtctcaccaggagcttcgtcactgtcttctagatctcccagcaggaatgtatcgagatcttgctcagacgatgcagtagatattctgttcttttcagctgattctgtccttccaagccctggactcttcttagcttcttcatctttactctctgctttgttcctaagttcctccatgtacttcctttcatatctgattcaaaacaaatcctttccgcttaattcatgcagctatcaagtctcataagaatgaaagacaagggtgctcaattcactaatcacttctcagaaatacacaaacaactaaggtgtcaagatcttctatatgttttcagtcatgttcctttgttttttatattctcatttgtgagttacatggttttccgagatatactggaccaagctagaggcagaatagatgatttgcagccacaagagaattcactaagactgtctctggatcaaatccgtgctgataaggtataatccatttcccatataattacgtatggtttcattttaccaaacttaagctgcagtgattaagctatgagactacctagtcatacaaatatagagatcttaagctatctttaccacctcctatgcgcttaatgcaattctcagtctagtgtcgataacattttcagactttgagaagagatggtagatccttacggtgcaacatgagtgctcactaaggtaaagtatatcctccagaacctcctttctttcataactcgtgggcatagttcatatctcaacttcgaaatttgctgcaacatacacaaaatgcaaaatcaaacaatgtagcacagaagagatgaatctataactaaaccaattatgcaagatcagcttctccaactaatcaaactaattccaatctcaaattcgaaaaatctaccttgacagaaccaagaacaagagtggcatgtctctcctgccactcagaaagatccttccgaacattcgacgcacttgtttccaaatcagaaacttccgacgattcatctaatccacatttaccataacacatttcaaatcctcaattccaaaacaaagataaagcaacaacaacaacaaaacaacaataccttgttcaggaaaagcctggaacgtagcagatgtcaaacctttaacaaactctctcaaatcatcagtaataccaaaactaacaagctcagattcagaaatctcagaaccaccaccaccagatcctgatcctcctaatcctccaggtataatgtcggcaatcgattttatattctggatctgatcagcttgtttcaatgctacgactttgagctgatccgctttcgttgaaacctcagcagcgaattcctttgacttcttcgccgtctcggcgacgaactcggagacattgatcgaatcagctttcttagaagcttcgagagcgaactctttggattttttagcggtttcggtgacgagattgacgaatgttgttgaagatgattgtagtgttatggtttgtgatttcttcgctgcttcttctgcaaacgatttcgctctcttccatagatcttccatttttttctcggtgtgttgattttttttctttcggatctgttatttttgcgttactgacgaaattaaaggtaacgttacggcaaacgcggagggaaacttctgagtcacgcagaggtgtttgacttttaagagtttattggtcgcaccattcctagtttcctattggccaatggataattttgttttcgtttgaaaatatgggttataattttaaatatgaaatgtttcaagtttaagaaaagaagtattcacataaaataagtgtttgaaacaaagtgaaagtgtgaaatacttgacaccataattaagtccataactctaccaatttttatttttaaagttaggtttagacttacatcataacaacattttatatccactacaataatcttatgataactatattgtgttgcagattttggtactaggaacgccaaataatcgataaaaccagcacaactagacctcaaatttgctaacacatggtatttgtgaatcttctacagtacaatagaaaacgaaacaactgtttttgccaataactatagtacgcttttactatatttgagcaggagaacaacaagaagaacaaaactagttatgattttcagcaaaaagaccataaaaagaaataatatggtttggggaaaaaaagaagaagagatagatcgatggagagtgataggtacgaaagaatatatggttggggtgttgtcgaactcaaatctttgtatgcagccagagaccactctctgcccccgacgggaccactccttcgccaaactatattattatttgtattgataatatcatgttaattcgtgtaatcgtaataatgaattaacctactatagacacaagtatagactaaataaagttgaatcgaggttaaataaagtggcctgtgggtgaggctgataggtacgtggaccattttggtagattttggtgaatagatcgagccaagttgcccatctctttggagatttatccaaatcttttctgattgttacgtttttgttaatttatacttcaatatatagcagtcgtagcttgtcgatcgttccaatataatctacttttcatactctttttgtctgaatgcctgtatgtattgagatatttggtttcagataacgtaaaaatatttgtatttattacaaaatgatagatctattttagtttccagttttacaatattgatagtttgattttgcaatagtagtttgtactataaagcctattattgcaaaggtggacaataataggttaagtaaagctaggagattcatacaaactataatttaaggaacatttgtagaaatatcatctatgttactttgttaagaaatttgataactaatatttttgaccattttaaaattacatgtttgctaaaaactgcattttaaaaaaatcttaattattttggattaaacatgtgattcttgtattcgattgtagtggcgaaacattaacatcatgtgattcgtgtgtgttaacatcatgtgatccatgtgtattatagttgatgcaataataacctaactaaagattaacgaagtgttcaggtattgatgatcggctcatgtatacaagtataacaatgaaatgacttctttttttcttccctcgctcgtctcatcctaattaagttacaagtgcatctatgagaacttggttgagccattctacaagttatatatttgcaattctgttatatatcatactcatacatacttcgccggaatttaggtttcgtgactgataagcaacccacgtaggctggactaagtctctgacgctcaccgtaactgttgtgaacgaacactgacgtggctgaaggcgaatgacaacacaaaggtctacagatattccgttggtaaagtccgccgtataaattaaggttttcttaccttgcagcgacgtgagtagagagcaaaatattggttgaaattatacttttacgataaaacaaaatgaagttcttagataatattttttacatatatatcaatagatttgtatcaaacaagcataatttttacattcatcatgagacagaaaaaaatcgttacaattttcaacctaaaggtttttaaaacaggttatcccgtgaaaagaagtctgataaaagtgtttaattttcatgtttttctatttggtgtatgacttagatgattatatacattgacaaaagaaaagtacgtcaaaagacgactctttagtaaaataaaggtcaatatttcgcatgaataatgctctcacgttcacacacactaaagctactatcaaaggtgacgactcatgagaaaggaaacatttcagagttgaatcatatacataataagcccttagtttcttatacgtatgaaattgtactgcaacacttgtaattacaacacaaacaataccattttctaacgagacaaaaaagttagaaagtgtgcacgttagcaaaagtcagaatctcacaaaaaccttcttgtcttcgcatctggcttttacagctccgtctgacgtggaccctttttagtctcgtaccgacgtctcttcgttttctccaagagactctctctctcttccttatttttaggattgttattttaacgaatttttagtatacctttgtcgataaatcaatttagcagtcgtgtataatgcaattacgatacttttttcttttgatacgtgcaacaacgagttattaaaaatagtagtagtactattcacttttaggtgagaaaacaaaaacagttcaaaagttggaaatttttaaacaaagttaatgaaagacacgtgacacgtgcgtgactgccactctgtctccacatgaaaatctgactcacgggtctgcctcacgtcgcgtgcaacttcgcttttaatattcctctaattctgtctttttaaaagttaacattactaattttaaaaataaacccaaaaaaagagttaagaagatatttatttgtttctggaagcatatatatattttaagtttctatgatgcaaagtggttcaagttgtttttgagtaaaacaaaattcgcatatgaactcgacgaaattctacatgttacgtttgtgaaatgtgaacatgttaattagttgatcgattgtttgcatacaaatattttttaaaaaattaaatcaccgttactaattcataaaatatataaggccatccaaaataagtttttttttgtatttaaatctattgataattaattaattaataatttatttactgcaaattgggaaagcttaatttacttgtttagtagtaactttagactttagttaggtagaattaggggcggtgttgtgtctccgtgtagttgaccgttgactcaggttattttattgtttttgattagctaataacatcatggcttaagtatattattattattgcgtaacggaagacagttatttagtagttaatcacaggttaaaatctactaatataaaattagtgtgttaagtgtaaaactaaactgatactgaaccaagaatccggtggattccataggcctaaaaggctatgacctgataagacctagttctagggttggggaccatactgtattaaccagttttggttttggatatttaatgtatttataacgaattttataaaaccttcatgaaaaccgtttgcgtaaagtcgaaaactgttgaatggtcgatatattactagaagaaaagcgaaacatataagtttaaaatttataagagcatccacattacatatttgaattttaagaaaattagcaatatcttaaaagaggattgatgttcgtagcaaattttttttatcccttagcaatattttcttcttctacattttcagtttaaagacaaacatgtgggcatgtggctcaaattacttaagattttactacagttttaacttttaacaatcaaatggaaaaatattgtgagctcgtcacaaagttacttccaccaccgacgaagttagagaacatgttttttgttcatgcatgctgcatgcaaatattcaattttatagtaaactaacatagttaatataatacaaagttttgatattttttgttaattggttaataaatgaaaattatgacattccagtaatatattacaacaacaaataatacgaaactcgaaaagtttagaaggctagtatttataactatgacaggatttgcattttttgatcattgccggtctaaatgacgcacttccatgaattcgcttggaaattatgttgcatatgtcggccacgacgtttttttgctccttaattccgtagtccaaatcccttttatacgcggaaagtattattttataacattagaactgataagtgtagttataaagtttaaccaaaaagaaaagtgtagttataaaacctccataaaaagaagtaaaaataatcatagttataacaattagcatattaagaagattacactgagttaaacgatattagtatattactcacaccaagtaaaacgtactacattttctttaccgttattaaaatgtctactacatgcctgcaccgctaatcaaggctaatttttcattaccatgcaaactttgcatagtttaaatgggtcaatgcaggaacaataatataatagaagaaaatctcaaaaaaaaatgaccaaattaattgaacgacaaagagaaaatccaagttcgtgactaagaagtgactagtccatatacgttagtagatatagagccccgcgcttgaatctcgacaagacaaaaccatgaattaataaggaacatggtcaccttcacatcacttcgattcggacaaacgtaatattttttattatatcttttaaaaatctcctctttatagctaaactcttgtcttcgatctccgaaagcaaccttttggaccaacgacctcgaacacacacaaacagagtttataaacagtgtttcagccactatttaactatttcatctctacgttaatccatgaatattttttattttctccttgggtaataaaagccaatcatggtagatattattaaccgaccatctgtgatatcaaattgcgacaatgtgggcaaatatatctgtcatttacacagtaaaagtagtaaaggattctataaattatatacaccaataatttggccctcttgattgactcgatgtgtgtatcagaattacactatttataagctatagtaatagaaactaatttagaaaatccaactcacatgatggatatgtcttaatgccaccgtttgtagacccccggcgtccactttcgattttttggagctttatttgtccatctattagcggatgggttgttccgaaaatttcaaaacactcgaatcggttttgcgttttagctcgagtttttcttcctcattttttcttcgtttgcaatagtgaaaattacttctcaatgatgcacttgttgtacaaccaacattttttcttttcagtataatttaacattttattcaaaaaaaaataaaaaaaattacttcttaatgcctcatcatttcgaccccacattcactttttatttttggagcttattttgatccatatgtaagtcaatgtgttgtcccaaaaaatgtaaataaccagtttcttttttcctaaatcatagtattacaaattatctcgaagacattttgacctccaacactaaaacttaagaataaaagatgtactagtattttgagataaatgacaaatatcttcttgaattaggtcttagcttgaagatgaacaagtgggagagtagacaaaacgtgggatagattacgagaaattcagaggtgaaggaacatagtaagagaaaggtaggttcggccacagcagattcctagaccggctctcatgcagcacgatgctttattttgtatgcctaaccatgtgactgcagtctctccatttaattcagttggccgctacttgtttctttgtttttttttcctaaccatggttagtttgtaacactggttagtggttactcacacacttgttactacttccaaccttttttttcttttttttttgttgtcttcaaaatgtaagaaactttaatacttcttaatatgttgattggttttgtcactttgtagacccctgatttttaactatttcggtaaacttttgtaaaacaatttgggtttaaatctctcatgttttattagttgtacatctcagctaatgacaatagctcaagttaacgtatcatacaaaacagcaaaatagattcgaatttgatttttttcttttttctttcaggtagttatatatataactaatgtattgcaaatatttgaaaaacataaagttcaatgaatctaaatttgataattagattaacaaaatcgacatcacatgtatgaaatcgaattcctgaatattcaaaatattgtgtttttttcataagttcttgcatgcatttgcaaacgaaaaaaatcgatttcatatgttatatatatatatagtcgtagatatgtcgtaagtacatttgggtatgaatatttggataattcatcatgggtactagatttcgctgtcgttccatttgtaaaatatcaggattttttaagaaaaagttttatacaaacctgtattacatgtttgaatgaatgatcatacatatatatatttgttaaaatactactatttaacacattaaaaatgacatcctggaaaaaattatattaaatttgaaatctctacatatttttgtgaaatattttgaaaatcatgccaatatatatatgattatattcattcagtcatggtggatcatcattttgtacaccaaaacacattccccattttcttaaaagaaaacttctatatatatatatatatatatatacaaatactactattagatgtgaatatgtagaaatatttgagtcccatgcgaactttacgtaaatatgttgggaaacgattatatatatataactcacttttcttatagaaatagatagaacacaaatagtgtgtgtaaaactcacacataattaaattccatagtgttttcggttgttgaaaaacatggaaaatgccgaggaggtctcgaatctgatgtatttatttatcaataatttggtaatgtgaaataataaaccaaaaaaaataaaaacaaatctttaatgttgggaaagagatgtgaatgaaggtacggtcaatatatagacaatggtacgtaaagcgaagagtacattgccaccctgtaaactctgtatgctctatgttttcacgctattgattttcgcttttcctctgtctctcaacatttatgtgttccatcggttaattcttgaatctcgattgtatttaattccgacagaatcttaaaaacaaaactatttgatcgtaacaccatttacgtttttcttcttctttctttattaacaacatgtaatataacgaggatttaaaatcaatgttagtgtgtgactcaacaaatatcttggtccatcagttacgtttttttaattactcgatttaattggatcatttaaagtaatcatcaacgtttaacaaaaacacaaaatatggtccatttaatactattgtatatttttggcttcttttctcggtctcttgtaaattctaatataaggaaaacaaacgttggacaataattttgatacggtacaattattccatatggtcgctctttaaaaacacccatttgcagttatcttttttcctgatttgaaatggaaatagacatatataatatatatatatatattccttttggagcaaaagttaggaaataaatatatattcttcagagattttatggcacattgtatatatcttaataatattccatagaatcaatacgggtcatgaatctctcttcacgatggaatatatatgatttattaagatggaatcatggaatcatatcatttctttttcacactaataaggaaattatcatatatatcagaatctctacattacacgatccaatctcaaaagaataatatataatcggcttaaaattcgaaacagtaattaaaaaattttcacatcttctactccgagaaatttgggttacagattagaagagaccttgtcataattactacccagtaattttatttaattaccatcacgtggttaaacaaagatatgtagcatgctaacttatccgcgcattttagctattttccacttaaaacatactactgtttactaacatacgctgagagttacagttcacacatcttttctcttccttcttcttcactgtatattaagaacaataagcaatatcagttttttttttcctctgatcgaagccgcgggaaagttataataatataaagatatttttcgtgagagttgctcgtttatgggagaatcgtgtcagattaatttctatttttgttggtttaattttccatttttaatttaataattttaaggaaatattattagagtgaaaggaaaaaaaaaaagatcttgtgggtcgccattatatatgcaggtctttctccaaccttttgctccttctctctcaagtgtcaagaatcaaacagtggcttaaacccaaaaaaggaacatgggtatgtctcttttttctttctttcttttttctcattgttgattcttcttcatacgatttttgggtaagatatttcattattggttatggggttttcagtatttggtagttgcaggttaaagtttttgtttttcttcttcttcttgtggtttttttctctgttaagctcttttagaaatttacctaggatttgatgtcagtggtatctctctgtttattggtatttacaagaatacagagagaaagaagagattattattcatgggttttgttctgatttttgaaagtttctgtctttgaaactcactgatttttttatatttgggaattttttgattgcagatgttagtatgagtttttcacaagatatggataatgagtatgagaagctgataagaagaatgaatccaccaaggtattaacttttttctttctccttcctttttgttattataactacttttaatagtgtgatatgattttggataaaaacctctgttttattttccagggttgtgattgataatgactcttgcaagaaggcaactgtgataagggtacacttataattttggtttatgtctatatatcttgtttattcatttatgtagacttgtcctgaattttttgttttgtcttcttgatgttgtttaggtggatagtgcaaatgaatatgggattcttcttgaagttgtacaaatccttactgatcttaaccttactatcactaaggcgtacatatcttctgatggtggttggtttatggatggtatgttccgattgttaaattttctttttttttggattctctttactttagaacaagggattgattctcttattctctctgctacttggcagtatttaatgtcactgatcaagatggtaacaaagtcactgatgaagttgttctagactatatccaaaaggtgagtgtttttttgttaaacttgttatcttcttcttatgtgtgagtgagagtttaatgagtgtgttgtgtttaattctcagtctcttgggcctgaagctt

SEQ ID NO: 127 - DNA, 99698 bp, Arabidopsis thaliana
gaattcactaagactgtctctggatcaaatccgtgctgataaggtataatccatttcccatataattacgtatggtttcattttaccaaacttaagctgcagtgattaagctatgagactacctagtcatacaaatatagagatcttaagctatctttaccacctcctatgcgcttaatgcaattctcagtctagtgtcgataacattttcagactttgagaagagatggtagatccttacggtgcaacatgagtgctcactaaggtaaagtatatcctccagaacctcctttctttcataactcgtgggcatagttcatatctcaacttcgaaatttgctgcaacatacacaaaatgcaaaatcaaacaatgtagcacagaagagatgaatctataactaaaccaattatgcaagatcagcttctccaactaatcaaactaattccaatctcaaattcgaaaaatctaccttgacagaaccaagaacaagagtggcatgtctctcctgccactcagaaagatccttccgaacattcgacgcacttgtttccaaatcagaaacttccgacgattcatctaatccacatttaccataacacatttcaaatcctcaattccaaaacaaagataaagcaacaacaacaacaaaacaacaataccttgttcaggaaaagcctggaacgtagcagatgtcaaacctttaacaaactctctcaaatcatcagtaataccaaaactaacaagctcagattcagaaatctcagaaccaccaccaccagatcctgatcctcctaatcctccaggtataatgtcggcaatcgattttatattctggatctgatcagcttgtttcaatgctacgactttgagctgatccgctttcgttgaaacctcagcagcgaattcctttgacttcttcgccgtctcggcgacgaactcggagacattgatcgaatcagctttcttagaagcttcgagagcgaactctttggattttttagcggtttcggtgacgagattgacgaatgttgttgaagatgattgtagtgttatggtttgtgatttcttcgctgcttcttctgcaaacgatttcgctctcttccatagatcttccatttttttctcggtgtgttgattttttttctttcggatctgttatttttgcgttactgacgaaattaaaggtaacgttacggcaaacgcggagggaaacttctgagtcacgcagaggtgtttgacttttaagagtttattggtcgcaccattcctagtttcctattggccaatggataattttgttttcgtttgaaaatatgggttataattttaaatatgaaatgtttcaagtttaagaaaagaagtattcacataaaataagtgtttgaaacaaagtgaaagtgtgaaatacttgacaccataattaagtccataactctaccaatttttatttttaaagttaggtttagacttacatcataacaacattttatatccactacaataatcttatgataactatattgtgttgcagattttggtactaggaacgccaaataatcgataaaaccagcacaactagacctcaaatttgctaacacatggtatttgtgaatcttctacagtacaatagaaaacgaaacaactgtttttgccaataactatagtacgcttttactatatttgagcaggagaacaacaagaagaacaaaactagttatgattttcagcaaaaagaccataaaaagaaataatatggtttggggaaaaaaagaagaagagatagatcgatggagagtgataggtacgaaagaatatatggttggggtgttgtcgaactcaaatctttgtatgcagccagagaccactctctgcccccgacgggaccactccttcgccaaactatattattatttgtattgataatatcatgttaattcgtgtaatcgtaataatgaattaacctactatagacacaagtatagactaaataaagttgaatcgaggttaaataaagtggcctgtgggtgaggctgataggtacgtggaccattttggtagattttggtgaatagatcgagccaagttgcccatctctttggagatttatccaaatcttttctgattgttacgtttttgttaatttatacttcaatatatagcagtcgtagcttgtcgatcgttccaatataatctacttttcatactctttttgtctgaatgcctgtatgtattgagatatttggtttcagataacgtaaaaatatttgtatttattacaaaatgatagatctattttagtttccagttttacaatattgatagtttgattttgcaatagtagtttgtactataaagcctattattgcaaaggtggacaataataggttaagtaaagctaggagattcatacaaactataatttaaggaacatttgtagaaatatcatctatgttactttgttaagaaatttgataactaatatttttgaccattttaaaattacatgtttgctaaaaactgcattttaaaaaaatcttaattattttggattaaacatgtgattcttgtattcgattgtagtggcgaaacattaacatcatgtgattcgtgtgtgttaacatcatgtgatccatgtgtattatagttgatgcaataataacctaactaaagattaacgaagtgttcaggtattgatgatcggctcatgtatacaagtataacaatgaaatgacttctttttttcttccctcgctcgtctcatcctaattaagttacaagtgcatctatgagaacttggttgagccattctacaagttatatatttgcaattctgttatatatcatactcatacatacttcgccggaatttaggtttcgtgactgataagcaacccacgtaggctggactaagtctctgacgctcaccgtaactgttgtgaacgaacactgacgtggctgaaggcgaatgacaacacaaaggtctacagatattccgttggtaaagtccgccgtataaattaaggttttcttaccttgcagcgacgtgagtagagagcaaaatattggttgaaattatacttttacgataaaacaaaatgaagttcttagataatattttttacatatatatcaatagatttgtatcaaacaagcataatttttacattcatcatgagacagaaaaaaatcgttacaattttcaacctaaaggtttttaaaacaggttatcccgtgaaaagaagtctgataaaagtgtttaattttcatgtttttctatttggtgtatgacttagatgattatatacattgacaaaagaaaagtacgtcaaaagacgactctttagtaaaataaaggtcaatatttcgcatgaataatgctctcacgttcacacacactaaagctactatcaaaggtgacgactcatgagaaaggaaacatttcagagttgaatcatatacataataagcccttagtttcttatacgtatgaaattgtactgcaacacttgtaattacaacacaaacaataccattttctaacgagacaaaaaagttagaaagtgtgcacgttagcaaaagtcagaatctcacaaaaaccttcttgtcttcgcatctggcttttacagctccgtctgacgtggaccctttttagtctcgtaccgacgtctcttcgttttctccaagagactctctctctcttccttatttttaggattgttattttaacgaatttttagtatacctttgtcgataaatcaatttagcagtcgtgtataatgcaattacgatacttttttcttttgatacgtgcaacaacgagttattaaaaatagtagtagtactattcacttttaggtgagaaaacaaaaacagttcaaaagttggaaatttttaaacaaagttaatgaaagacacgtgacacgtgcgtgactgccactctgtctccacatgaaaatctgactcacgggtctgcctcacgtcgcgtgcaacttcgcttttaatattcctctaattctgtctttttaaaagttaacattactaattttaaaaataaacccaaaaaaagagttaagaagatatttatttgtttctggaagcatatatatattttaagtttctatgatgcaaagtggttcaagttgtttttgagtaaaacaaaattcgcatatgaactcgacgaaattctacatgttacgtttgtgaaatgtgaacatgttaattagttgatcgattgtttgcatacaaatattttttaaaaaattaaatcaccgttactaattcataaaatatataaggccatccaaaataagtttttttttgtatttaaatctattgataattaattaattaataatttatttactgcaaattgggaaagcttaatttacttgtttagtagtaactttagactttagttaggtagaattaggggcggtgttgtgtctccgtgtagttgaccgttgactcaggttattttattgtttttgattagctaataacatcatggcttaagtatattattattattgcgtaacggaagacagttatttagtagttaatcacaggttaaaatctactaatataaaattagtgtgttaagtgtaaaactaaactgatactgaaccaagaatccggtggattccataggcctaaaaggctatgacctgataagacctagttctagggttggggaccatactgtattaaccagttttggttttggatatttaatgtatttataacgaattttataaaaccttcatgaaaaccgtttgcgtaaagtcgaaaactgttgaatggtcgatatattactagaagaaaagcgaaacatataagtttaaaatttataagagcatccacattacatatttgaattttaagaaaattagcaatatcttaaaagaggattgatgttcgtagcaaattttttttatcccttagcaatattttcttcttctacattttcagtttaaagacaaacatgtgggcatgtggctcaaattacttaagattttactacagttttaacttttaacaatcaaatggaaaaatattgtgagctcgtcacaaagttacttccaccaccgacgaagttagagaacatgttttttgttcatgcatgctgcatgcaaatattcaattttatagtaaactaacatagttaatataatacaaagttttgatattttttgttaattggttaataaatgaaaattatgacattccagtaatatattacaacaacaaataatacgaaactcgaaaagtttagaaggctagtatttataactatgacaggatttgcattttttgatcattgccggtctaaatgacgcacttccatgaattcgcttggaaattatgttgcatatgtcggccacgacgtttttttgctccttaattccgtagtccaaatcccttttatacgcggaaagtattattttataacattagaactgataagtgtagttataaagtttaaccaaaaagaaaagtgtagttataaaacctccataaaaagaagtaaaaataatcatagttataacaattagcatattaagaagattacactgagttaaacgatattagtatattactcacaccaagtaaaacgtactacattttctttaccgttattaaaatgtctactacatgcctgcaccgctaatcaaggctaatttttcattaccatgcaaactttgcatagtttaaatgggtcaatgcaggaacaataatataatagaagaaaatctcaaaaaaaaatgaccaaattaattgaacgacaaagagaaaatccaagttcgtgactaagaagtgactagtccatatacgttagtagatatagagccccgcgcttgaatctcgacaagacaaaaccatgaattaataaggaacatggtcaccttcacatcacttcgattcggacaaacgtaatattttttattatatcttttaaaaatctcctctttatagctaaactcttgtcttcgatctccgaaagcaaccttttggaccaacgacctcgaacacacacaaacagagtttataaacagtgtttcagccactatttaactatttcatctctacgttaatccatgaatattttttattttctccttgggtaataaaagccaatcatggtagatattattaaccgaccatctgtgatatcaaattgcgacaatgtgggcaaatatatctgtcatttacacagtaaaagtagtaaaggattctataaattatatacaccaataatttggccctcttgattgactcgatgtgtgtatcagaattacactatttataagctatagtaatagaaactaatttagaaaatccaactcacatgatggatatgtcttaatgccaccgtttgtagacccccggcgtccactttcgattttttggagctttatttgtccatctattagcggatgggttgttccgaaaatttcaaaacactcgaatcggttttgcgttttagctcgagtttttcttcctcattttttcttcgtttgcaatagtgaaaattacttctcaatgatgcacttgttgtacaaccaacattttttcttttcagtataatttaacattttattcaaaaaaaaataaaaaaaattacttcttaatgcctcatcatttcgaccccacattcactttttatttttggagcttattttgatccatatgtaagtcaatgtgttgtcccaaaaaatgtaaataaccagtttcttttttcctaaatcatagtattacaaattatctcgaagacattttgacctccaacactaaaacttaagaataaaagatgtactagtattttgagataaatgacaaatatcttcttgaattaggtcttagcttgaagatgaacaagtgggagagtagacaaaacgtgggatagattacgagaaattcagaggtgaaggaacatagtaagagaaaggtaggttcggccacagcagattcctagaccggctctcatgcagcacgatgctttattttgtatgcctaaccatgtgactgcagtctctccatttaattcagttggccgctacttgtttctttgtttttttttcctaaccatggttagtttgtaacactggttagtggttactcacacacttgttactacttccaaccttttttttcttttttttttgttgtcttcaaaatgtaagaaactttaatacttcttaatatgttgattggttttgtcactttgtagacccctgatttttaactatttcggtaaacttttgtaaaacaatttgggtttaaatctctcatgttttattagttgtacatctcagctaatgacaatagctcaagttaacgtatcatacaaaacagcaaaatagattcgaatttgatttttttcttttttctttcaggtagttatatatataactaatgtattgcaaatatttgaaaaacataaagttcaatgaatctaaatttgataattagattaacaaaatcgacatcacatgtatgaaatcgaattcctgaatattcaaaatattgtgtttttttcataagttcttgcatgcatttgcaaacgaaaaaaatcgatttcatatgttatatatatatatagtcgtagatatgtcgtaagtacatttgggtatgaatatttggataattcatcatgggtactagatttcgctgtcgttccatttgtaaaatatcaggattttttaagaaaaagttttatacaaaactgtattacatgtttgaatgaatgatcatacatatatatatttgttaaaatactactatttaacacattaaaaatgacatcctggaaaaaattatattaaatttgaaatctctacatatttttgtgaaatattttgaaaatcatgccaatatatatatgattatattcattcagtcatggtggatcatcattttgtacaccaaaacacattccccattttcttaaaagaaaacttctatatatatatatatatatatatacaaatactactattagatgtgaatatgtagaaatatttgagtcccatgcgaactttacgtaaatatgttgggaaacgattatatatatataactcacttttcttatagaaatagatagaacacaaatagtgtgtgtaaaactcacacataattaaattccatagtgttttcggttgttgaaaaacatggaaaatgccgaggaggtctcgaatctgatgtatttatttatcaataatttggtaatgtgaaataataaaccaaaaaaaataaaaacaaatctttaatgttgggaaagagatgtgaatgaaggtacggtcaatatatagacaatggtacgtaaagcgaagagtacattgccaccctgtaaactctgtatgctctatgttttcacgctattgattttcgcttttcctctgtctctcaacatttatgtgttccatcggttaattcttgaatctcgattgtatttaattccgacagaatcttaaaaacaaaactatttgatcgtaacaccatttacgtttttcttcttctttctttattaacaacatgtaatataacgaggatttaaaatcaatgttagtgtgtgactcaacaaatatcttggtccatcagttacgtttttttaattactcgatttaattggatcatttaaagtaatcatcaacgtttaacaaaaacacaaaatatggtccatttaatactattgtatatttttggcttcttttctcggtctcttgtaaattctaatataaggaaaacaaacgttggacaataattttgatacggtacaattattccatatggtcgctctttaaaaacacccatttgcagttatcttttttcctgatttgaaatggaaatagacatatataatatatatatatatattccttttggagcaaaagttaggaaataaatatatattcttcagagattttatggcacattgtatatatcttaataatattccatagaatcaatacgggtcatgaatctctcttcacgatggaatatatatgatttattaagatggaatcatggaatcatatcatttctttttcacactaataaggaaattatcatatatatcagaatctctacattacacgatccaatctcaaaagaataatatataatcggcttaaaattcgaaacagtaattaaaaaattttcacatcttctactccgagaaatttgggttacagattagaagagaccttgtcataattactacccagtaattttatttaattaccatcacgtggttaaacaaagatatgtagcatgctaacttatccgcgcattttagctattttccacttaaaacatactactgtttactaacatacgctgagagttacagttcacacatcttttctcttccttcttcttcactgtatattaagaacaataagcaatatcagttttttttttcctctgatcgaagccgcgggaaagttataataatataaagatatttttcgtgagagttgctcgtttatgggagaatcgtgtcagattaatttctatttttgttggtttaattttccatttttaatttaataattttaaggaaatattattagagtgaaaggaaaaaaaaaaagatcttgtgggtcgccattatatatgcaggtctttctccaaccttttgctccttctctctcaagtgtcaagaatcaaacagtggcttaaacccaaaaaaggaacatgggtatgtctcttttttctttctttcttttttctcattgttgattcttcttcatacgatttttgggtaagatatttcattattggttatggggttttcagtatttggtagttgcaggttaaagtttttgtttttcttcttcttcttgtggtttttttctctgttaagctcttttagaaatttacctaggatttgatgtcagtggtatctctctgtttattggtatttacaagaatacagagagaaagaagagattattattcatgggttttgttctgatttttgaaagtttctgtctttgaaactcactgatttttttatatttgggaattttttgattgcagatgttagtatgagtttttcacaagatatggataatgagtatgagaagctgataagaagaatgaatccaccaaggtattaacttttttctttctccttcctttttgttattataactacttttaatagtgtgatatgattttggataaaaacctctgttttattttccagggttgtgattgataatgactcttgcaagaaggcaactgtgataagggtacacttataattttggtttatgtctatatatcttgtttattcatttatgtagacttgtcctgaattttttgttttgtcttcttgatgttgtttaggtggatagtgcaaatgaatatgggattcttcttgaagttgtacaaatccttactgatcttaaccttactatcactaaggcgtacatatcttctgatggtggttggtttatggatggtatgttccgattgttaaattttctttttttttggattctctttactttagaacaagggattgattctcttattctctctgctacttggcagtatttaatgtcactgatcaagatggtaacaaagtcactgatgaagttgttctagactatatccaaaaggtgagtgtttttttgttaaacttgttatcttcttcttatgtgtgagtgagagtttaatgagtgtgttgtgtttaattctcagtctcttgggcctgaagcttgtttctccacttccatgagatcagttggtgtcataccatcaacagacagcacggttattgagttaactggatgtgacagaccaggtctgctgtctgaactgtcagctgttttgacccatctcaaatgcagtgtcctcaacgctgagatttggacacacaacaccagagcagctgctgtgatgcaggtcacagatgacttaaccgggtgtggcatttctgatccagagaggttgtctcggatcaagaaccttctcagaaatgtgcttaagggaagcaacacaccaagggaagctaaaaccgtagtgtctcatggggaggtccacacggataggaggcttcatcagatgatgtttgaggatagagactatgaacaccgtttggtggatgatgattcctctatccaagatgaaaggcaaagaccagatgtttgtgttgataattggctcgataaggattactctgtggtcacagttagatgtaaagacagaccaaagcttctgttcgacacagtctgcactttgactgatatgcagtatgtggttttccatggaagtgttgatactgagggcaccgaggcgtttcaggtaaagaaatatcccattaccatagagcagagagtttccttgaatccatttacttatcggtctttgtctttgctttgcaggagtattatgtgagacatatagatggatcccctgtgaaatcagaggcagagaagcaaagagtcatacaatgtcttgaagcagctatcaaaagaagagtatctgaggtaaatgatccagtaatatatagtgtctggtatatactctttctgtaactgtcactgagagatcattgtttgatgttttagggattgaagttggaactgtgcacgacggatagagtaggcttattgtcaaacgtgactcgcatattccgtgaaaacagcctaacggtcacaagagctgaagtgaaaaccaaaggaggcaaagctctaaacacattctatgtcagtgatgcatctggttactcaatcgatgctaagaccatagattccataagacaaaccataggccaaactattctcaaagtcaagaacaaccctcaagaacaacaacaaagacagaaatcgccttctcacgaatcaccgacaagatttctctttgggggtctcttcaagtcgaaatcttttgtcaactttggcttggtccgttcctactcttgaagaacaacttcacttagctgtgaggtttcaatctcatctaggttttaactgctttaaacttgagaagaatctgtaaatctatcgccagatataatcttaaattcttggtctaggatccaactttgggtagggaaaaaaagacaaaagagttttagttgatgtcatgactaagtgttaagtgttaacctactcttcttgtatatatatcaaatcctcattatcttcttcttcagattattatgtcaaattaaaatttccatgacttgaaacaaaataactacaaaagacataattatacttcataatttagtgatttatgggaagaaatatgattgaatgattccaaacaaacctcctaaatttacaccaaaaaattattggcttatgatatcgaaagaaagactctagcaaattaagagacaccatttcaaagatttttttttgtgaatgaatgtaaaattaattcaaccaaaaaaatgttttccattaaatgtaactttttctaaaatcttaagctgaaaataatagatatagagtctttaagaattttcttgagccaaaccaaatacatagcccaagtggagaatggatgaacattacacataattgcaacagatttttcatagtaaatttgtataaagaaatataatctatagcatgtaacaaaaatgaacatgtgagggggggtgtagatattgtcaccaccgaacactttatggggcgtgaatactgaaactatgtcgatgacaatgtgtgtatgatagattctcgagtcacatgttgagaccaacaaagtgatacacctccccaccaccacacaccgcccatttagttttccacattcattgataaatgttacatattttttggcttttcaatttgaaatttctcagaatttactaaactaacatatatatatatattgacatgtgactcgtctcaattacatggctttcagtgtgggtttaggattcttcatggcagaggaaatcttttaactttcagagattgtctttataaattatgagattgcagactatcccacatgcatatttaacaacattgtttttgagttttagttttctccaactacaaaaaaaatgaatgatctacaaaaatttcattttcttctgattattagagattaatgtgtgtttggcatgagtggtcgaattttatatacggtaataataaaatgagttttctaagtttgagaatataaataacaataagaagaagtaattttgtttcatctttcacgggttaagcttaatgatttattctattttatagtgtgatttgattcaaaacatctaaactgtgtgagatagatgtagtgagaattatacattttccgattttcgtctagaagatatgacgaattagctaaaacctaaaaataaatacacggccgtacgcggccacatgttgccaacgataacgcattcctcatgccaaaattaaaattctcatctaatataagaagactaaacataaaaattgattaagaaaagaagaaaaacacactaagcatacttcccattataatagatctcatatctatccaatccattgaccattgaccagttttttttcttgtttgttttttttgccatattgagtcaatacaggcaccaccacaacaaccacactttcacccaatttctatttttcttacgtttaaaaaaaaggattttcttctttatatttatccatactattaattactctattaaaatcctcacgctaagcaacccctaatttcgttatcagcttaaaaccctttaaaaggaaaaaaaaaaacattcaacattttaaaacatcaacaaacccaaacaccaatccacacacaaaacaagacttgatacattattatcaagaagcaagaagcaagaatggaggattcaggacgtaaaggagatccatttccaggttttgagatgagagttcacaacgacgattgcgttttccgacgatctcttagctgccggcttcagagaagagctccttgtcctcttctcttaccaccaagacctcctccttcagcggaggctccttctactacgacaggtgtttctacgtctacgttttgtcaaaacggcacagatccgatccctctcttgtctcctctcgtccttccttcgatgcttcaacctaatccaaccaccacctctcactaattcttcttttgtctagattccttcttctttcttctgtaatgactattttgaaactcttttttttattgaaattttcaacatattaacgtagatacaaatctgttattgtctctatacaaatttcacaaagatcgtcttctctcaatcttgattatactgaagattttattttgttaacacatcatttatagtttgtacaaatacaactagattttaacccgcggtataccgcggaacgatttatttttaaaaataatatatattgaaacttgcaaattttatttttacaaaatatttatattttacagtttataattgttattaagtaatagtacaccacgaattcatgagacagttgttaaaaaaactgaagttttgatccctattaaaacagcatattttataattttttaaaattttataaatattgattcaaatacatccaccatataacccaattccaaaataaaacacgttctgtaatttctttacccgttccatgattttttttttaagtagtaatttttaaaatttaagaattatattttatatataaaagttttgcaaattgtatcattctctaatacatttatattttatagtttaattttatatatagtaatattatacataccacataacatttttggttttatataattttttctaaattaggatgatttgatatgtttaatattagtggtcttaaaaaaataataaattaaagatttaacccatattgaaattaaattaaattaattaaaatttagatatcaaatcttatatgttgattttgattggctattatttttggaaattaataatgtatttcgttttttaattaatttaattaattaaattagtatttgactttttaatccttaaatacataaattaatttactctttaaaattttatttctaatggcatacctatgtaattacttacaaaaattaaggttagatttaaaatgtacttcccaaataatatagtaagatatcatcaacttttatttttgatttattgtctcttaatgaaattattcaaggagtgtgtgcacctcacgccactcacaccaattaatacctatagactttggtctaatgtaactggaattggtccaaaaattagagaagacaagacctctttacatgcttccagagctaccaacaaacccaatagaaattttgttgttgcaacaatctctttaattaatgtacaagtttctttcaatcaccataaaccttgatttcttagttttttttcccacaaattctaccaacaatttattgtttttctttttattatgttcttaattctgatctttctttggtgagttttttttttttttaattttgataaagaaaagataagtttgtgagtttaaacactaaccctgttaatttttcttcatcacattgttaatgatgcgttgacataggaacctttttcctataccacaaaaatttttcttttttttttctttttttgtgtgtgtgtaaaactccacaaaaatttaactaagagttaaaactgatgaaaaatcttaattttttggtaagatttatagaaaaatgaaaaaggttttttacgatttgttttaattaactatagataaccaccttatttagatacgacgaccaaattaattgtcgtttggttaaaggtcataagagtattaattggagccgtcagattatttattgacttaaatatacctcactacttttacatttctgcattatctctacataccatatattataagacttaatttcggatatatatgtgttaccaaaattgaaattctctcatttacatatgtttcctttaaaatttaaaacatgattttacccacttgatgatcacgaagaagaaaaggaaatcaaaataagatatgatgtactatatgaaattgcgacttgatgattacaataaaggaaaaataacataatcaaaaactagattaaattcaattttcgcatggaattacataatttcattataaaaaaaaaataacatacaaaacttttaatttaaacgtccaaaaaccctacattattccaaaaaaaaaattgtttgaaagtaagaaagaaaattaatacaaagtgagagagaaatatgtttaggtgacacgagtttcactctcaattccaaagacagaccaatcaacgaacaaaacccattttctctgatcgattaggccacgacgtttcctgaggtgcagggcacgagtcgctcaatctctctcttcttcttcttcttttcacgaattttctccgaaacttggtttttattcctcaaacccataaattagggttcagtttttaagcctccgtcttcttcttcttccgtcgtcgtagtcgaaaggttagttcgattatattcaaatctttactcactacgatccttaaattagtgggtcgttttcaaaattttgatttgattcgattttccttggtagaccataaaacctagaaatatacgattaggttattcaattgctgtcgatttctcgatgtaaataggtttcgtttggtagattctagaaacttatttaatgtctatgatcgttgctaggttttgtatcgtgtagtgattagtttatcaaattcacttttgttttgagttgttacctaatttagttttagctgattttgatgaagtgggaataagaatctggttatagtggtaatgatgtgtttcctctgcttataggtggttttagctatatggatatcttctactgcaaatactcttcaaaacggatgctttgaagccttgatactaatttcatgcgttctatatatgtgcatcgtaaggaagtaatgggagagaatcgtcagattagatcacgttcttggaatagaatgccaactaaaagatgcagtgcaaatggcataatggaagagtttattctggtagatgatgatgatgttatcattcttgattttcctgagtcatctaaacggaaagctccgggtacatccagaaccaggaaggagtccattatgccgagagtgattagcattgacgatgatgatgatgagacagaaaatgttcagaaagctgggagtagttcaagcggtaacttgcaaacatctgcagaagtggataatgacgattgccaattcattcaggagaagtgtgctacttttagattttcaaaatgcaaacagactttctctacaatgccctctcatggtattcgatttggtttaggctctgatacttatagtgacttttccgagagtgactgttctgattgtgagattttagaagggtctcatagagatgtccgcgagcagtgggaacaagcagctctcttgagaaaaatgaagaaagcaggtaaagctggtttgagtgaggaggctggtccttcgaatctccactgtgacactaatttcgagcctggttttgaaaggagaactgaacaacatgatcaaacgtctttcttctttgctgcaagaaatccagatggtggaaaagctggtctgactgaggaagctggtccttcaaatctccactgtgacaataatttcagacctggttttgaaagtagaactgaacaacatgatcaaacatctttcttctttactgcaagtaatccagatggtgaaaaagaaacctcttctactttctttggagccgatggtagaatccctgatatgacgacttattttggctcggtaatggaggaagacaaccaagctaaacacactgctaattctactttttccagtaaagaggattttcgggggccttccccactgtcacccggaatacgagttgaacatgaaaggtttgatacaccaccaactcattttacttcgccaaaagaaccgatacatcaaactagttttaagaaagttgtagaacagccaaacaaagtgcaagttcaatgtgaaacttcactgtcacccgaagagaatcaaaataaaaacgtcgcgtatcagtcttataccaaggaagttgaagaagaagaagacgcatcaaaattgtctccgccacagacttctaatggatatggagatacaacgcatgtgtttggcacccaaagtaatggagccaggtgtgagcacggcataagtttagatgaatcaagagaaccgatcattgatcctattccatctaccagtggacaagtgcaaggtactaatggtacagctcctgcaattgatgtcatgcttaacagagagatattgaaggagactgatgaatacaagagagcacaagaagaagaatgggagtccaggcaacgacagttacagatccaggtttgaccactctctatacaaatttttgaaagcttcctttaaatattgaaaactttgccacctgtgaatatatcgactttaattgtttcttgcaccttcttcaaagaacctattcaacctagtttctgtctgctgaaatatattgtgcctattacaggcagacgaagctcagaagcaacgtaagagaagaaagttagagaacatgcgaaagttggagatggaaagaaggcaaaaagagagggtagaggaagtgagagagacacagaagaaggtttctacttttcctcagtggttgctctgaatatcgtgttgattcactgctaacacaaattttgcttttccatctctatatcacaggatgaagaaaacatgaacatgaaggagaaagttcgtgcagaaataaccaaatcgcttaaactgctggaactcaagagttttaacatggcagcgttgcttcgaggcttagggattcaagttggtggtggaatatctcctctgccaaatgaggttagcccatcatctatcgtttacagttagttatactgtatttgttaacatttttgtatttacgtattgaattgtaaaattaggtacacgcggcatacaaacgagcagtattgaaatttcatccggacagagcatcaagaggtggtgacatcaaacagcaagttgaagcagaagaaaaattcaagcttattgctcgcatgaaggacaaatttaagcttattgctccctaacattgacccgtattatcaaaatctttttttttttttttgaatttcttagaatatgtaaatagtttttttgattatccaacaggaaacaaaattgtgttggtaggttttaaagaagggaaaaatagaagaaacacagtggtaatggtatcaacgtcttctcttcttgcctttgcctttaccaagttgtccagatttgaaagcatgttcttgttcttgaaggaaagcccaagctttgccatgtttctctgctctctcttgctcatgcgcagccttctcttttgctttaacagtgctcatgaagtagctgtctttgcgcagctcacgaactgctcctctggcttcccgttttaactttctcttcaattttttgaggtcagaacggtatttgtctggatcgttatccatgcctggaacaaagctgcacaagaaaagtatatacaccattatcgagattacccagtgttgtttttgtacgttataattgagtgagggagaatgaatttaggggagagacttacttctcttcaaatttgggattgaccattctgatggctactggcttatgcttacgcatagagagtggtttgcgttccttgtgatggtcgtcggttttcttttcgattagctttgcaacatcttctaatttctccttgagagtttgtgggatcttttcttggtttccaatttggtgcaataaagttgagatgggcatgaagatctctggaaaggaactcaatcctccatttatctccacaaacccttcaagagtctcgactacacttgaaaggatgcttgctctgttcaaacaaagccaaaagtattattaggctcttttgctggctgttgatgtcttagcaaggaaatttaatttcagaagagagaacagacctgaaatcatcagagctgaaatatggagagtctgctggctcattcattatctttaggaagtttaaaggcatgacctcctttacgttgtcttgtatgcacagcaatggagtcaacgattttaattccataaaatgataaaactgtaacaaaatacacaactcagcagcctggtataataacagttggctctgtgcatcttcagttctttcttcttagatgcagtattgagcttttatcaatctaaaagtgtaagcaaaatacaaaacgaggtcttgttcaatggcatacctcagattccgcagatgctggtgactttttgtctgaagcagccatcaggagagtccgaataaataatatggcttcaggacagaactttttagattgcttagcaacctaaagtacattttcgtttgcatcagaaaaatgaaaatggaaatcgccaaggaaaagggtggggatcaacttctccttaccaagagaacaatggagcataaaaaggaacctatggcaatatcacgaccagaagagatgggacagcgcatgagatattcacacatcaacaaaatcgatggggtcatcacagcatggcgaaagtcagagcatggaaaaatcagggaccagagccgcaagagaaataatgttttcaaggaaggccagcatccatcctctggaagaatgtttatggactggttagggtgaaaagatactagaggcatgtatcttaatagacactaaaattcaaggttatggaatcatcacaaacctggattcttgatagcctcgcaaaattgtgaacgggtctttaaaagccgctggcgagcacatattgcagcaaagtaggggatctccatgctcatctcaatcaaaggtttgacaagcatatttagtaaatcaaagttcaagggctttttgcttgcaagaacggcaaaatactgcaagagaacaccatagaagacctgggtggcaaacaacaacaaacagtcagaaagcaagtgaggcatgaaccagttcaatggcctgacaacttaaccagaattaaacctttgagagcaaaattaaattttacctgcatcttttttcggttttcagctttaatcttaattgagtgtgctatccggattcggttgacaattagaataacatcttcatttgaacaatcttccactagggcaagtaattcctcgaaattctttggaggatcaatcatgaagggaatatcacgctgcgttgaactcattttcttcatattggttttttctttcactgttcccgacaacccttctcctttatatggagcagcatagtcattcttcaactttttatgtacccttagctcagcatcctcttcatcatcatcttcttcatcatcatcctcttcctcatcttccagctcagcccctagctcatcatcactttgttcccagtcttctaaatgatgaccttttctctgcttctcatcacctccatctgactcaccatcatcatcttcttcttcttcactttctgaatcctcatcctcgtcactttctgaattatcaacattatcctctctttcaagaacatcatcaatccatccccttttcggcttatcttcttcaactgagaaggaatcaccaagatcgtcaccagaaatgacagttagcctctttgtagactcctcaccgccaatttcctcatccccatcacttaactcctcagtttcctgcatccttttcttacgctcttcctacgagttttgaaaaaattgtatcaagattaaataatgtcaaccataagaccttgacttcacaataagataagagcctttcattatagtggttcatcatatacattctgtaaaagtcggaatgtaaaactgcaatggcttataaccagaaacatacctcaagagcctctaacttttctcgctctttctgggcaatttcttcaggtgtctttgtcctctcagaaggacgagcacggatttccattgacatatcattcagacttagtagataaggatcgcgtgtattctgcaaacaaaaggattacatcacgaaaaagaaaacttatgaacagataagcctgataacacccatatagatagatacatatatgctcagtatttaaacagctacaaactgtgatctatgttcacctcttcggctacaaaaggcttagttaaactctccatcgcctcagaattcactaaggacttgaagtttttatcaagctcatccattagctttcccttttcctccttttgcttagctttctccatctgtagaccacccaaaaaaaaaaaattaccaactgcaaattgacacgccatgcaaaagacgatacaaggaaaacagcggaatactcaccctaccaagtttgctcttcatgatgatctcttccatgacttccttcttactcttacgcctctgcagataaaatccaaaaaaatatcttcaagaccatatatctcaaccatcacggtaaattacacacaaacatctacaagacgggttcttacctcttcctctccagatgcatcaacctctctgtttctgtttagatgcttcagtcctgtgatggttagacaaaattagctttgccaagtttaacagacacaatcaaagttgagcaagctgttaaaatgttatcaagaaaacatactctttgatgcagaagcttctaaatcatcatcttgaagatcttcatcagacaaaagtccagaatcaaaatcatcctttacagaagaaccaccaagagcaccatcttcataaacatcttcttcaccatcagacaaattatacatactcttcttcgctagtttcaactacattaccataaaacaaaattcagtttctttctcagtgaaagtatatgattcctcctctcatcaaataaactaacctgacgctgtctctgcgatctaattatacccttatcgaattcaccaagctcatcgttctgttctccaatacgcttatcaaggaacaccgaagattttaaactctgctcatactctttctccagcgtgttcttcctcttatcaacagcacgagttcgagaaacactgacgaatcgttcttcacctttacgcttttttccgaggatatcgaacttccggcgagatcggattgattcaaatggattatcgaccttctgcgttttagctttcatggccactgcatctggacccattcttctttcgccttttttgttaggcttcttcttcattttgttatctttccccatggttttttgctccggcggcggggatgacggtggttgctagggtttatgaattacagtaacgaaaaaaggttttgggagagttttgtttgttttaggcttagcctatatcgaattgctcagactcagactacaagaagacgaagaaacgggcgggtcggatacagtttgacccaaagcccatatgtttaattttaaggcccaattggggcctttctttttgggaaattggcaaacaaaagaaattgtttagtgaaatctcatatttcgtaaataatatgaaaaaggaattattcgccagactcgggatttgatcatacaattttttttttttcgatcatacaaattacgaaagtataattttggatgtattaaaaaaaatcgggtttgcgggttttccattgcggttttcggattagcaaattccaaaaaactaaatttatgcggataacaaaacaatccggcttgaacagtaactgaagtttttgacatacggatccgtcacaactcgcaaaatattttaatccattgcaaaaagaacatactagctcggttttatttatatagcagtaaaaaatccattacttttttactagagttttttacatacaatcataaaaaaatacatttaaagaagattttaagaagtaaaactcggaaaattattgcacccacaaatccgcaaccatgatttaaagtttttttaaaaaagttatattaatttatatgtgaatagataattaattcaggcaagaagccagaaatctttgtgacgtttagttgtaagagtgtatccaccaagcttcttgcctctcttacgaaccgcaatagccatgcaaggagagttgttgatgcaatactcgacgaagtcgtgtttggtcacgggtcgggcctgcgacgcccataccattagtagccgccatgtggcatgttgtttcttctggcctagaactagtaatgatgcttctcgttctcttgcctctttcactatggtcggacccttctcgtcaccttttacaaacaccacttctgtttttacctaatccaacaaattattgagtgatttctttctagatactagagtaggataaaatgttttaaatatatgtatgttggacagtgatatctagttaaaggggtatactatggttaaatgaaatattcatcaacatttttacgaaaatctaatgatctgtgtagtgcaaattgaaatgaacatttcgctaattctacttaaaaaaaataaaaaaaaattcaaatgataatattcataaaaaataatgtgcaagattattagttttacctatataaattaagatttcttaagaaaattgtttaaagatttattcgtagataaacaaaaaagtatggtaaagagacatattatgaacctcaggtcttttaagctcacacatggttttcaaggctgaaacctttttatcagctcttgacgttgttggtttgtcacaagattcgtcttctccttcttctttgttagctagatcacctagaaaacaaatcgtatatatatgtaaaagcaacaataattattcttgtggaagattacttataagaacaagaaagagagaattgacctgattgagaggttttagctttaagaaaatggagaagaagaatggaatcttgaggctgagcacaatgtgagagtgtccaaagcaaagcgtttttagcctccgagcaagaatcaaccacaacaattattcttcttccttttatctctatggaggtagttggtggctcgtggctgcagccatgctggctcgtagttgtcggtggttggactcttacattagcccttaatctgctcacaaagaacccttctcctttctttcccatactttctttctctctctctctcgatctctctttgactctttcccaatggaagaacaagaagatgatataagatggtgtagaaagtaaatgagattaagagctatagaataatgagtaattatgatctcgcttttggtagctccccacacttttatatacgtaatcctcagtttctccccaaacttagtagtcacatttttatttaatgagtaattactatccttctttggtagctccccaaatttgacgcgttgcacttgcatctaagtttgctaatcgtgtgcattttgtgtatagcaccgacatccacattccaaattcacaatctaatgggatttagaatcgttgtgaattttgcaatcactaattatgtgcaccaatgcataattaatactatatattgttccttttctttttattttatgttatcgaattttaagtccgtagattaatcatttacgtgagttgttttgtaattagaccatctccatcggcaaatggaaggaaagtttctcaaagaaaaaaaaatattagtattttaatctgaaaatatatattaattattatttaataattgaactaattatgttgtgacacatgtccaaatttaatgagaatagtttctcaaaatttctcagaagagaaactcagctctctctctcctacttttttttttttttttttttttgggtatctcaatgagatactccaatggagatgctcttatgtttttccccgatctaattattgaaatcctttgtaggtgaataaagatgtctatttacttgatacttttgtattgccttgagtatgatggataatgatgtctcaactcttttgttttattattagacatcgagtgttggccctttttctttcatcatgctcatcatcaagccataggtcccaacactaattcctgccaaccgataattgttacgggccatgtgatagtataacataattataaaaagtagtaacaattgtcataactgatcttgagttaaccaatgattctttttgtaaagcttatcatagaaatgtcttgttcggtgtgtggtttaattggatatagtcatatacagtacatcacatatttaattaaccaataaaaagtgggtttgttgttttaagaaaaaacaaatctccaacatggttttgctaattaaatggatttggcatgatatcaagtaaatgcaaccaccataattatctttcctttttttctttctaaaccagttaatatatatcctttttcgtgtgccaagaaacattattttttacattggttacacatttatgattttttttttaaaaagaaaataaattaaaaaatccagctccttaatcacttttttttttttctttcacgccccccaaaaaattcttgaattagtaaagtttttttatgtaacttttcttgcattaggattaagtaataaaatgatatacaataaacgacggttgtcgaatttgtaaaccagtaattgtttaaacaagtcaacattccaaaaactcgaaacttcctaagctcttttggtatgccacgtcataaaatatcccaacaaaatctccacgtttccttgtgttgctctccaaagaatcttccctagctcccgattacgggccaaaactagagtttgttgctttttctcatgcttgattgattcgtttgtccttcttcttctctttctctttctctggatttcaacagattgatccaagtccaaggtatgagaacagtttaacattaaaatcaatgttcttacgtttctctgatttcttccatgtcctgtcttttaataaactgtgattatttaccgtaatcacttacttgatgaactaaaatcttacgttgatttattaattcagataaatgggtattctactttgttgttttcaaattccggagtacaatgatgaatctctaaacgtaccaagaatcagagccttcactaacccaataactaataacttttcccccaaggtatcttccacattataaaccctaatttctcctttttttttcttctaccaagaacaagagctacataacacttatatttttgatccagctcgagcaaatatttcaaagcttagaaagagaggaaatttccactgtcgccgacgaagaagacgtttgtccgacatgtttctatggtaaaacaaaaaaaaaaactttgcaatgagattgaaaaacttatgactgattaagattgtgtgtgtttaataattcaattcctatttggattggagacagagtatattgatgaaaacccgaagatagttttgcaatgtggacatatctttcaccttgcatgcatctatgaatggatggagagaagtgaagtttgtcccttttgttccaaggtttttatatatctaacacatatctacggttgtgtctattcccgtcttgctcgccttatttatatccatttctatgacttttgaagtttcggaaggtaaattgggtttgatttatgtttttgatttttacagacaatgcttttcttggagggtgaagaaattacacagcaggtggagtaattataataagagatatcatcatattcttttctgcggctacaatttctattctttaaccataaaaaaaaattgagtgtttggaagattgtgatcaaattctttttgccttcttgcctgaaaaatgatcaattaatttcattgtggtgtttatgagacctaggccccgtttgtttgatcatttgacatttacatccaaatgatccatttacatgatccatttagataatgcatttgaatgatgtttgtttgataatttaatattttatataaatgatgcatttaactgaatatttatttgtttgatcattttgtaattcatctacattttcattctaataaaatgactaaaatacccatgatataattttaacaaatgacaaatatttaacatcattaccaaatataattttaatgaagaaatgattttacggttttggcaggaaatgtgattttgcggttttgacggaaaaatatgattttgcgtttttggcgagaaaatatgattttctggttttggcagaaaaatatgattttacggttttggcggaaaaatatgataatacaggtttggtaggaaaatatgattttaacgttttggcgggaaaacacgattttacggttttggcgggaaaatacgattttacggttttggcgagaaaatacgattttacggttttggcgggaaaatacgattttacggttttggcgagaaaatacgattttacggttttggcggaaaaatacgattttacggttttggcggaaaaatacgattttacggttttggtggaaaaatatgattttacggttttagcgagaaaatatgattttacgattttggcgggaaaatatgattttgcgattttggtgggaaaatacgattttacgggtttggcgggaaatatgattttacggttttgtgggaaaatatgattttacggtttcggcgagaaaatatgattttgtgattttggtagaaaatattaaaatattaaagttatttccacaattattagagttttttggtacaattggtaattttaaaaaaatattaaataagaaatctattgaaaattaatattattaaaagagagtatatttgtgatttgttttttagactaaatcatctccatccaaatggttctaccaagtccatccaaatgagttttacaaattagcgtaagtttacaaaatcattccatatattatattatttgtgatataactcattttggactagtttttttaagagtttaagccttttatcatttacatgtataaaaataaaatctctccaattatcatctatggttttcaatcgaatgtcagccactttgcataatacgatggaaagctttctgaagtgaagtcatttaaagtaaatactatcattttcacgattacgagctcatgtgtctgctctacatagacacgatcacagttttgttttatataaattaaaaacaagaaagagaaaactataatatatatataggatcagttattaatcccgtttgaaacttggttattattggtaaatataaaatttcaagataaataactaaatatcatcggtttagaattataaaaaagatgtaaatcataaaaaacaatacaactaaaatcagtttttaatatattttcttgtgtgtttttctagaaaataaagtattaagaaacaaaaagaagagtatataggatcaatcattaatcccgtttgaaagttggtaagaaccaacgggcatgagcggatgggatggacgaagaaacaaactggtgtgggatttcaaccttgtttgtatcgagattgtatatgaagatttcattttcttcgtaatcctcataaaaatcatcggcagtgaagtagatggagttacaagtgattccttccatgtccttagcaagcactgtaatacccaaacctagaagaattgactcatcgcctagagaaacaatttcctcccatttgttcaccttggatgaatccatcttgcagattataaattcccatgtttcagccatactgaaatgtaagctcgcgacaattaagacatctccacgtacagtgactatcatgttatagatatagcgattcaatttgagtttcagtggaacttcaggaaattcatcatatccataaggatttgttgcataacctacaaactcacgtacgctaattctgaaagcttcacgcgggaattctccaaaaaaatcgtaaatatagaggttggaatagtcgagataatgaagcttgtgatctttgtatatcatgttcaaacacatgtcggtacatgacgattttggcaactcggggaattttttccacgagttatctccatttttgaaagaaaccatagtttctcgattaatcgttcctataactaggtagtctttggttttgtcatctatccataatatcggatggctaagtccaaaaatatctgattcgaaagccggtagattgatcctctcgcaggttagaagatctttaatatatagatgaaactcttgatctaaagtttgatcttctaactcttcgtaacgaggttgcatcaaaagccaacttctataagtcgccaaaacaatactctttgcaaaatcgtcaccgagatgttgagttttgtagagtttttctttatcttcagggttgaacaagagacaataattcttgtctgttgggaatagaatcatccaagggatctgattgtttggcttagattgttttgaaccaaattgccaagatgaacaaaccgatttagctcgttcgaaatccaaaaatgcaaggcgttcgaaaaccaattgcatgagatctagaggaagcttggaccagcaatgaggatttctttgagagactgaaacagctggagatttcggaggaggagattgggctaaggctaacgttggtgaggccatctttcggattatcttatccgtcaagctttcaagtgtgggagatgatattagctttttctttttttcactctttgagagaaagttcatattaagagattaaaaactaaaggagcctatcctaatccaataataagaagaaaaaaatctggtgtaattgacaataaccatatctttctttctagtaatatatatttacatggaaattattttggatatatgtccatgagagatatgtatattgtagtaccttttgatttgtttatattttcttgctcacataaacaactttccataacacactgaaatcatattagatagatggagaaaaaaatataaatgattgatacatgaaatacaagtaaatacaaatgtatgacccggtagtttggttttaccaaatttaatcatataaccatgaaatacaagtcatatggtctcagtttagacttcgatttactcagactaaaccaaacaataccgggccacacatttgtgatttgttaatcttcgtcacttataaggaatatttttattatatgcaaaactcatatcaaatataatcacataaccataaaatacaagtcatggtctacatgtatcccataaccaaatacgattattacgcatccgatctgtaacaaaatatccaacgtcgcaagctgatatataattttgatgtgaggattgcaatcatataaccatgacttgtgtttcattgtttatccatagccaatttgggagtatctttgcttaagattttaattaagagtttggtataagtctctaggtcaactagaggttttggattaagggattgctattattatttttctaaagaaaattaggaattttgatttttgttatttaaatttctgtaaaattgagggtaaagaattatgagcctacaataaatggtctttccctattatatttgcgatcatgtgatgcatattgatcgaacatttattttagctaaagttaagatgcatgatgaaccactctgtttctattctaccatggtatttaatagtatttccaattagaaaatttctttcaaaatgtctacggtctacttttgatttatggcgaacattttagctaagtttatatgcatgcatgaaccattatgtttctattttagcatggtatttaatacgtacagactgctaatttaagaggaaattatatatttatatgtacacaaagaaacatatcatagtcttccatatctcctcttgacacttttcaataattttctatcatcgatcatgagtttctccacaaccacaaagatgcaaattttgttgttgtttctcgtaattcagctgtgccatggctcaaatgacactgtgagtatctcgctgaaaaggcatactctgaatgtcgggggtacttcttttggtggtttaaaaaactttgatggagttgtcttttacggtgagatttctgtgggtagtccgccacaaaaattcaacgttgtttttgacaccggcagtactgatctgtgggttccttctaaggaatggcctgaggaaaccgatcataaacaccctaagtttgataaggatgcatccaagacatgccgtttgatgaaaggtactaacatttttccttttaacttttttaaaaaaaaactcttttaatgtatattttcattaaaacttcctcgcattttctagggggagaagtaaatattgcatatgagacaggaagtgtcgtcggtattcttgcacaagacaatgttaacgtaggcggggttgtaataaaaagtcaagatttatttttggcacgtaacccagatacttacttcagaagtgttaaatttgatggagttattgggttgggcatcaaatcttcacgtgcgcaaggatctgtcacggtttgggaaaacatggtgaaacaaaagttgataactaaacctattttctctttatatttgaggccacacaagggagatggaggagaagatccaaatggtggccagatcatgtttggtgggtttgacccgaagcagttcaagggagaacatgtttatgtaccgatgaaactaagcgacgaccgctggaagatcaaaatgtccaaaatttacattaatggtaaaccagcgatcaacttttgtgatgatgtagaatgcacagcaatggttgactctggatcgactgacatttttggcccggatgtaagagaattaagttttagtgagcatatagtttagtttgtatcataagttggtaaaaaatatttggttttgtttcattctgtttaggaagctgtcggtaaaatctataaagaaattggagcaaccaaagtaataattagatgcgagcagtttcctgctttgccggatatctacttcgaaattggaggaaaacatctacgcctcactaaacatgatgtacgatcaggtttttctatcatttgagttgttttttaaagcctttttcttgacctttttttcttttatgttttttttttttcagtacgttgaggtgaagacaaatcccaaaaaaagatgcagacttcgtattgtgaagtctaaaaatcgtcgtaaagactggtaataggctctaaagttgttgtaataaaattttctctaacccatatgttaagaaaataaccattggatttaaatgtagggtcttgggtgaggctttcatgacgaagttccatacggtgtttgattatggagatgttaaaaccccaagaatcggctttgctgaagcaatataagaaaattagtaaaaagagtacactaaacaagttttatctaaattttatgacaatatatatgtgaaccaatattgttattctgtaagcgtgacttcttaataaaaaggaattatatatctgtcatttctatctatactcaaaacgaattaattaataactcatatatctgactatctcaaaaatcaaaattatgctttgctttcctattctcttcattatgcatttaattctgctctgttgacttcttcaacaatcctctatccaaagaaggaaacttcttcaagaaccaaaaaatataaagttgtagtaactgaaacatgaagaccaaacaatataattaccaaaatgtttaatacagaaattgttttctaaaaaaattagcaggaatacaacgaagagaagataatgtgagagttacgcttaccacaacgtgccttttcttgagtttagcaacattttactgaatgtagatgaagagaagataatgtgagagttacgcttaccacaacgtgcctttctggtggtgatatatcttaagaaccttagtgggcattttcactggtccctttactgtaagtctcgtgtccttagctccatgaaacaagtcaatacacactaattattcgatcactaatcaaacaaatgtatcagagagactaccagggtgttacattacagatcctcatccattcggaggcactgttattattgcctatcttatctaattagaagcaaattctgggcctttataggccaacatccttccttgattctaattgggttctattccgattaatacggcccaaccactcaagttcgcttgttgtaaacttgaaataataagaaattttgccactcctaacttaatgcaacaaaaaaaaaaaaaggtccgatctattaagttcacgttcattctctctgaccttcaaatatattacaattttgctccatattgaagcaaataaacttatcaaattacaaaagaagaaaggagcctgctaatttatatatgatgatataagaacatcgaacatttgccaaaatatattaattggatgaaaagagcctagccactatttatatgtatgtggcaaactgtttttattgttgacgattacaaatatatatatggaaatgcttcatgcggcgaagcagccaaggttgcagttgtaaacgggttcaagagtcagttcgagatcattcctcctcattgccataggatcatcttcttgatacagaccactgcattcacaatcatacataggatatatatgaaagtgcatatgtaatcatatgtttcaccgtacaacaaaggaaaatcaaatatcagtccattgtgaaatgtcaaagatatattaatttcatttatctaacaaactaaaattgtacttaaacacatagaccaacaacaacaaaaagtcgacttaggcttttcgcaaccattccatgtacattttccacactaataagtttgttcgtttggcgaccattgcattaacctacgttaataaaataatgttttaaaataaagttttctagtttcaaaatcatgacatcatgtaaccatcactaacagctataacttcaatgaaattacaacacctaacgtaactagcttgcataacatatgtgctttaaattaagactgattagtaattttttgttaccccatgttgagaaaaggagatggctgatgagagagcatgtaaggatgctggatttggtgctgctgcggtggcagagggggaggcatattgtggccttggttctgctgatcccactgctcctgttgagccctaagaattttttccctctccttgatctgccagcaaatttatttcaaaccatattatcatcatcaattttcaaagtgaagaaactatatatatgcaatggttacaaatagttattttcacagttgcactcatgcaatgaactattataacatttttataattaggagtagtgtctatattcatatacatagatatgagctaagtagaatgatgggacaacatttcaaagtttcaaatattttcaatccgagagacaaccttaaaactaaacggacaaaccatatctacgtacaggctggtgattatatcaatcaatagacaacatctatgctatttcaaacaatttgcaaagattttctatttttatttaatggtgccgaagttaagtggagatatgaagatatcgtaggtatagcttggctggaagtgtggagcagaacagtggaaggtaacagtaatgcaatggacaacatgttgatgaaagagaaatgatgacatgtgttacctgtttagaaagcatgctgttttgctcctgtatggccttctcctgtcatttccgaaacggcacgattgttaattagctttcctatacgtttctctataagacatacatttgataggggttttacatacctttttttggagctcattgatggactcgtacataagttggttctgcatacacacacatcaacattaacaacccattactttaagtaatatgagtcttaaaatacacaacataactcatacattcgaaccaacctatagacatatcaaattgatattgattactgatatatatattgatacatacacatatgtatttcaatgttcacattataataacacttgtaaacgtttaagttatatagatatgttcaacgaaatagcagaaggcaatacttttctagtgcggatgtgcttaagagcagtgtcaagctgctgctccagattctgaagctctttagggctcattgcttgcaagtcttccccaagataatgcctgaatttcaatagcatcaatgaattttaacttactttaaaatggaacccgatcgatttcctagatagaaatgtgatgagtgtaaatgtgtacctctggtttctctccaaaagctcaatcttagccttaagcctgttatactccatcgaccagtttgtctgtgtaccagaagttttatacaaataaaattcatcaatactacaaatagattgatataatatatatgtggattaaaaggagaaatatttattgaaatacattgacgtcggactcaggtgcaataagctgtctttcggcgtaagagtacctctcatagcgttcaagtatcttctccatactgatcatttcacagaattagggttagctttatcatcaaccaattatcattttattatataaataatatggagatgtaaccaaaatatcatcacattttaggataaatctaatgatggttttatgcaattaaaccaagatttcctataacaaatcaagtaccgatctctatgatacctttataataacaaaacagtatgaatcatagaccctatgctcttagcttcgagttctaactgcggtttctttaattttgctacaattaggtacagaaaatcttcttagatgcgacacattataataaattattataatcttgccaatttaccaatcttattttttttcagaacaaggacaatgcttaaaaaaaaaaagaaaaaaaaaaaaagaagaacagctgttgcttgttggagctaagtttgaccatcggtaagaagccgattttaggatggagttaattctttttatggatccccagaggtcaaagactccctactcagatttgacatctttgtttcagttttaatttctaaagtcaaatagaaaaagaagcaacactagttcaaatttaatactatatagtgttttatattacgagttcataatcttaagatccgagtttaaacattttctttgcttagatttgcaaaacatgaagacacagtcgtgagaacaaattagatattcttttacagctgaaaaaaaacaactcgtaagttaaatattctttctaataaaaaattctcaatttgacattattatctatatctattttaatttattttctcgtcccataatattttttaattataatccagttgcaacttatatatgaaaaaagaaacgacacttcatttaaaactcgaactcagtgagcgagtgaaaactacagatcttattttcttactatggcatcaattagagcttagatctgcaaattcgaaagacatggctattggagaacaaaagaattcattatgagttagggatcaaaaccctagttcaaagattaaacatacacccttctatatgctcttgagtttgaagatatgatgctgataaatattgcacaatatatcaaggtaattactatggtataattagtgtgttctagggttcacttcactacggccctaaagttttgatttttaaattatacaaatttgtattaaacatttttctggctaatcaaaaaatccaaaaatggaagccctagaaaatatataaacaaaagcagtagtgaataattagggcaaatcaagtagtcaacttaagggggaaaaaactatataaagtagcagattaaaagatttttttaaaagtaaagaattagttgaagttaccaagaatcagtggagtattcgaagagttttcccttatgggagaagacaacaagagcaacttcagcatcacagagaacagagatctcatgagctttcttcaaaagaccagctcttcttttcgagaatgtcacttgtctattgatcttgttctctatcctcttcaattgaaccctaccccttcccatttttgatccttttttaagaaacttcttactctaaaagaaccaaacaaaacaaagacccccaataagaaactacaagagagatataaagaagagctcagactttggtatgaaccaattaggaaagtttttctttctttcctttataaaaagacttgtgtttgagtctcgggatctttatttatggagagatttgggtaagagtggttttagggaaaagctaaagctggtttctcttgtttgcaaaaaccacagtggtttctttaggatttgcgtgtcgacttctcattggtatatctcgtactaatgtcgggtccatgattttttaataaaactgcggacttaaaaatatgaaaataaacaatttgattatcgacgtctcgtgaagagaaatgggtaagtaacattgtacggaccactggtccttccccaagtgtcaccttcgctttgcattgacggcggagatttccctgtagatctacgaaacaaaatctgaaccaaccaaaatatctatttttaatttccttttattaacatttctctattaccctattttacactattcttttggaataaggtgagaaccctttgttttatcaaatttgcttattatatttaatgttctcagctgtaacagtgaagtacaaatagacctttcttttggcaatagatgtttttggtagagctgagaaccaattgacaactgtgtaatgtattgcgtcgacggatttgtacgcaggatttaaggaaagagaggaagatcgagaagaataattgtaagtattcaaaatttcaaacccaaaaatagtattttgtcaaagatttgttcaatgttgtgtgttcttattaagttgtagatgatcaggacaaaaatcagttgaatatgtgctatgttgttaatcaaacatacatatattttttttcgtcaatcaaacatatttagtttgtacgttatatccatatatattgttaaataaaacaaccatatatatacaatttgatgtcaatcatataatgaaataaaccacataaaaacctttgctcaatttgcttaatcacttcttttacaatgaatttccgttgtaatagttttctcttttgagatcttcaagtgtgaaaaaaccccttattttcagtcaatatccaataacaaaaaaaaaaaaaacagattcggcatttgcttaaggcatatattgcataagccttagagaaaacaatataattaagtgaaagttggaccacgtttcaaatttctttgttagtcaagtgttcctgttttagttgattactttaaatatctcaggtttgaggactaattgatttttcttgttaaaaaatttctttctgttttttccatttcttctcttatttggtgttttccacgtgtcttcttccttatttgatttactttgtaatttataaatatttggacatcttttagcaactattgcttacggtattattgtttcatcaaaacaacaattatactaattttagaaaaataaattagaccatgtaaaaagaaaaaattgtaatatagtaaaatctatttaagttaaagttcatttttagttatatatttcttctatgccaaatgaacctatgctaaaaagatgtcacttgcattttaatccaactttatgtattttcttcatagaagttatattaaatctggtatggtatgacatatatacttgaaatggtcgtggttatataaccaaatttaaacatgtacgtcctgagttttgaaacgatacataagttaaaagatagtgtatagagaaatcagtctaaagatagtatactatatatatgtatgatatgtatatggagatcatgagcaaaagtagtaagcaacaaaaggaaaagtagaaacttaacaaattgagcaaaactaaaagaatctaagctcgtggccttgaagacaacatcccaagaatatccattatcttcgcctttgttacatctccacccttcttttcttcccattaaatatccctttttactctctttcagtttattattcgatgtagcatacatattttatatacaatatctcgatccactaagatacggttacatctccaccattagcttccaaatactaaaataattaattacttctaattagaaggacgtaatctctatcttcagtagtaaaccaaatgttcgtcatcatacgaagtggatttagaacatatagtcgtttttgaagcagatcccaagaatagtcttcgatcggtcgaggtgcccaagtagaaaaaaagaaggcaggaaggtttgtttaatgagtgatctttgtagtcacgagagttgtgacttgtgaggttgctttgtatcacggtgatgcaattattattattttatgtttttaaataagtgaattataggtaagtttttttaattcgaatattaacatattggtttaattaaaactcaacattcgaatggcaaataaataaaaactgaacatatgatctacaaattatcataaattaaggagaatagtgagtctttagtgaataattaaatttccaagcagttttaaataaatgaaattaaagagagaggttctataattgatttcttctaattaattagaagatcggattttttttttaatttgacgttagagcttagaagaccagattaaaatatcagtctctgttattttgaaatatatagctagatcgcttgttgtgaaacattatgtacagttaattcaattatgtatacgggagaaatgaatgaagagcaaaattgtcttagttaggtctctatcaaagagcaagttgggtccaatccagccacatcaaatgtccaattaatgtacacatcattagcttttagccccaccattctatatatatacgcagctacacacatgtacgtatatgtttcttttagaaatttagtctcaatttgttttaaaacatcataaattaaactttagtaaccgtaacgattatgtaaaacaaatcttggatgttaaacattatattgcaaatttgataataactaatgaaatatcatatcagtgttttatttttcttatataaacaacaatttgttgcatttttataaatctatcaagatttatgtagtatgttcaatcacatgagaaatcacaaaagagaagtacatatgatatgaatatgatgtatacgcagcagctagcatctattttgacgctatcttctaaccaccacgttcgatatatatatcctgcttgttgcacttatcaccacaaaagctctatatatcattttcagatctctctttatctgtacataaacatatctacatacacgttacatgaaattatttcctaagaacttgaaatgaagcaaacggtcttattaggaaacaaaataagaagaagttaatttttgagacttctcaatgttcttttaccaaaatatgttagtattgttgtttcttttttctttgttttgccaaatatgttattgttcataacttcagatccaaggtccgtgagctttgttttggagtaagtaggctttgaatacttttgatcaaaatcccaaattgtatttcaaggcccattaagctttggttccaagctttgtctgttaaataaatcttagttgtatcattggtttcatcaaaggcctattagctcagttggttagagcgtcgtgctaataacgcgaaggtcacaggttcgatccctgtataggccatttttgtttttgtcagcatcgttccaacttccaaccatcaatattttgtttccattccacttcctctcaggtggtctcttcactaatcgatttttttgtgtgaattaataacaaaaatgtgacatatgagaaaccaacttgaggtggactagtggttctcgcttaaattgtaacaaatttatgtaggtcaagatcaaaataaccgactcttctcaaatattttaagaaaaaatagtttttttgtattgcattggttaacctgcgatatttttaattaaaaaaaactatgattttctgggttcttaattttgattctaatttaggatttatttattttaaaaagaaagcaaataaataaaatagaaaacatgtagaaaaatcatgatatttttgcccttcattatgaaaatatacagatggatggatctctgtgtttggcacaatggcaacaaaaacgaagatctataatgaaagaaaacaaaaaacaaaaacgaagaggcaaaagcgccaatccggtaactgaatcaaagccactccttccatatctttgttcatttaaataaacgcttatcttatcatcttcaaaagtattttttttgcctctaaacattacttgccctacaaaataaaagaggacgtcggttataaacggacactaaaaagattatgtcgtttattcaaccgacttgctaagggccaacataagttatatatatagcctggaaataccaaatatctaccatgaaatatctcaataataattcttattctatatccgaaaattataaaatttgaatttcataaaatatacttctttgaaataatactttgttaatagtattgggtttctacaaattatgcccgcttcacgaatgcttaatttactttgtttcacaaactctaaaaccataagaatatgaaaattaagtttatccaagataagctaaatttatggcaaccagaaaaggtatagctagatttaaaggttaaatatataagggtatattatataccgtctatatattcttaaatgtgatttgttttgtttaataatataatgtgatttgcttggtttcattttcaacaaacaaatagataaataatattttctttgtttcaaaatataggatattttagaaattttttatttgttttaaaatagataatgttttatcatttttctgcatatatttattttaataacattgaaaagtatctagtcaaaaatgttttaaaaaggcaaataccagtcgcaattcatattgatggcttccgaaatctcaatgaccattagtattctttttctaataattgagtctttttttattaaatgatgatttttaaccaaaacaacatataaatacatagtaacttttcaaattcatatctcattaaaatcaaagaaaatctatttatctaatttaagaaatttagagttttttttaatacggaaacataacatacagtacagtttatgaaagttattttatcgacaatcagtcaatcatagtacacaattatatatacttttagaaattctaatatcatcatttttctaatgaaaaccctataaatacccacaaaacactttaaagaaaactaaattcactgacaacttctttaccttttgttggagcttttccactcgacaaacaaatgactccaagaacctctcttacactcttccttgctctcaacctcctcttcttcacttacacaattgccgcattattgccaccgatcccggacatcccgggcatcccagcaacgccaaacaccccggccaccccagccaccccaaacaccccagccacgccaaacaccccgaccacgccaacgaccccgaccacgccatcgaccccggccactccagccaccccagcaacgccaaacaccccattaacgccaacgacaccgaccaccccaacaacgccaacgaccccattaacaccaacgaccccattaacgccaacgaccccattaacaccaacgactccgaccaccccaacgtctccgaccaccccaacgtctccgacacccccaacacctccaggcacaggttctttatcctagagatgccctatagaacggtttttaagctagtggacctaagagtctaagactggaatctcacccgagccatgttgttcatctaaggcttggttgacctgaagtttcattatacctctatatcgtctttgtaattgtgtcttttcaatttgaatactaaaagtattatcaactgatcgatatatgttgttgtttatatcgggtttatatgtgtgcaacttatgcatttgctgagcatcttgaatttcgaaagtttattttgtttaagaaaaataagtcgcacataatttagacaacgttaaaaatattttataccaaataaactctttttactttttctacgtaattagactttatttatgaggataagctatgacgttttgtaaaagttttgcattgaaacaacactttttgtgaaaagaaaacaaagacctaaaacaagccggcccgttatatttttttagttatcttttttcttttcttgcaattgtgaacatggcataaaacaaatcttttaaaaacttccaacattcaggtacagtagtaattatcacaggaaaaacgtcataataaaaccgggtatttagcttgtctatttcaaaaagatataagtattaattaaatagaaaaacgtcaccaatgatccggcccatcaaattgtagttgaaatgatccttcgatcttgatgaatgagtctcaccgagatcctttgactgaggaacaatattggtaccttgatcctttgattgagtatcaatcatacagatattcactgaattgaggtaatataaattacttcttcttttttctttttccaaatcttaaaccaaatcatgcagtttttctattaatcttaaacctaatcatgctttgttgttttatttctaaattaattaaaaactataaaacagagcaagatacacggatatgagacgataaatagattaaagtcgatgttaaatgacatcactaacgtactttttatctcgtttctatgaaatctgactatctggtacaacatattttaggcgtcataatcaatcataaagcaacggaaatcttaaaataacgatgataaaagaagataaaccttaacagtgggaattttgttgactataacattttaccaaaagatttccattccatcttaaattataccaattgagaaattgagccaaaagagacaaaaataaggggaagataattgtattgagctattcaatgaaagaaagtgaatcacaaagacttaaacgaggtatgaattactgtagttgaagtgaaacagacgtagcacagatattcgtatagcagtcgtcgagaataaatatgaacaagtattactttgagcaaatgagtacttcttttattcatgttgaagtcacacacattaaatatagaagaaaatatggtcgctgtcaaatacatcaaaataactcatcaaatgtataaactggaaaacaacatatataacaaaactaggaatacaaacacaactcagagcaataatattcattacggagggaactttcattccatgttttcaagatgactgggaatatgcaacgagacttgcattgtttgcaaagtggtcgagacatactgttgttgcgaaccaccacaaaatatacactgacatcgtggacgtagattgtttctttccttcttggcttcagaccacggaaatcgccgagcacacaattcgtatgcaaagtaagttcacaatctttagaggtgtaaaaccatgtttttggatctgtttctttctcacaaatatcacaccaatatttaccatctgcatcttcttcgccatagcgtaaagagagaatgttggtccacactatgctttacctcatatggtaaaagagcgcacttgtagtccatgatgtattcacaatcatcttcaacgcatctgagcacatgttgtgcctcttttttgcaaacaatgcagattcctcgtggcgatgtgtaaaataagggatgaggatgacttttgtggacaaatggctcagtaattgaagcacatcgcaaatccaatgaagcgcgcattgcttcgtatctaaaaccattggaaaacaatccacatgccgtacatcttataaaataatcccaatatttatatttatgtcggtcattgcttactacatgtcttttccatagaggcagataggcgcaactctcgtggagaatgaaactacaactcatgcagctatagaaagagtggtgatagataggataaacacatgcctcacaaatcctctcctcgatgaagataccagacttgtcaagtcttaggttatgctctttatggctaacatgttgtattgtgttttcatcgataaccttgaacggtagaatatcttcctcttcttcaggttcgtctttcatttctttgccatcccatacatcttctctagtaacgcatttggtatgaaacactgaggtgggacacctcttacaagaataacctccacaactccaatccatattcttacgacaaattccacataccgaattcaccacaccaataagagaagtgcgagaaacgcgatggtcatgacggttgatgtttatgacccatggaaatccagagcaatcattgtggcttgtgaaatcacagggaagacatacatatgggctccggtctccttttagcccgcaagaggtacaagaaaaagagatggattttggcataagggtgagttgatggccatggatgtttgggtcgtgaggattttgttttggtggataaaaaatacattggagatctaagctaaagttacaagcggaacaatgataaaagacttcagaattagcaagtttttctccacacaaacgacatttcttatcggtataagcaggtggttcaaccttgacgagttttagagggtgtaagggatgggaaaaatgggttacctcggccggatgcttttcgcagtttacatgaaacttcaaatcgcattcatgacacttgtatgaatatccatcactatcctttccacaagtggcacaagagaagcaacttttcaccatctctagcttgagtttatggtcatggtgctgaggaacatcaatgacctccgacggtgggtacttagcgcaattgaaatggaaatatgaagaaccaaatcttccttttctcagaggtactaaaacacacttgttacatatatagattaagctatcgtagatcttctctccacaccctgcacatctccctccgcctatattaaagttgtatgtatgattaagaatgttatcacacgtttgagaagggtgggcgatattgtaagtattgttggcgcatgtcttgtggaatacatgggtcacaccggtagccatcagttacacctatgaatttgagtccgcaccaattacactttgactccattttcacaggtgttaatggatgctcgtgagattgtatgttaaccttcaagggttccatgacgtatgtaaatcttgcgtagatagattacaataaggaatgaaggaatgaaggaaagaaggaaagagaaaaaaaaactgaatataatcttcgaaacgttatgctctttttctgtaaattttgaagttagatttgtgtaatctcaagtaatggtgtgttttataacattctaacttgttgaccaattattagtttttagaatagtgtatgatattaaaattaaactttagacctaacagagtaaccactaaccatctaccattttatataatgttaaagtcacatggcaaaattctttttgtttgataagagttttgatgtccatgttagttttacattattgatatcaaaataaataatttgaaacattagtataccattacatttatctgatagatacctactaacaacccaccattattatgtattgtgtgctaaagataatggagagtttctttatattaataattttgccacttgagttctatatgaccagaatatctggtaagacttgttctattgggtaggtaagactccatataatatttgacttgacttggcaaatcagtttatttcttgagtcaatatatattggttctttgtcaatacatacatataaatgctaaaacaattatataaaactaaattatttctgcttctaacttttttttttttggttattgttacaaattaacagttttttccataaaaaataaaaataaaataatattgtttctaaaaggaaagataatcttctctcgccttcactcctaattctatgggtgaatctaatcgggatatcgaaaaaatagcgggtaaatatttggaacgggtaatttagatagtcaaaagtaatatcaagtacttatatactactatggactcttaagatgcccggaaatacataccacgatggcttggggacttagattttaggtcagcacatgctgtcgaataaggattttgaccgtgcagttgtgtcttcgattctgggctgatacatgttggtcttcctaggctcgtggttcttcaagactcccttgtgttttgaaaaatcaggcttggtcaagtcttatgggcttaaatgggataaaatcctcctttgatagctgtaagcttaaaatatgtccacaaccttaaaatattttcataactcctcaagaatgtacttgtagtggatccaataagttccccccccccccccccaaaaaaaaaaaaaaaaattgtgtgaattgtgatgtatgaaagttgtcatatggtgagaaatgggggactatctttgtaggcctaccacactgtattgtctcaaaaaagtagggcattgttgagttctaagagttgtcatttgtggggccgaacatatgagcccattgtgaccaaatacgataaacttattgggctaaatggccccaattataacatttcgtgattcccataaaaatattttcgttttggggggcattgacaaatgaatgactgttccttatttacttaattgttttgcaattggactattggagaggataatatccaaaggaggaagatgagatcacacatgggaagtgtttgatagaaagagatgggactggtaagagaagcatagccataagaagcaactttaagaatggtgaggttcacaacaaaagaaagctatctatcttacacactcatttccctctttgtctccttcaccaattcctccaaattttagattttgacttgacaatcatagcatggggcgattatttatttggataaaatcaattgtttatataacatatgtatacgattataataggtaggtactccagtgatgtcattatttagttttgcattatctaaattatattcactcatttcactttcaagaaaatattgaatattacaaatgtcatctcaaaatccaataatttgaggtacattgtataagtataactaatttgacaacaaagtgtttagtaatcttaatcaaaaggtgtcaagtaaatatgaaatgaagagtatacaataaccaggtatcgaagtgtcagtagctcaaccggtttactttggtttaaatcttaatttgtcaaagatagttgacaatctttcatattaactttgaccaatattaggttacttaacagctttggaattataatctaaatacttggttactttaattgaaatccgaaatttgtttcaacattgggaatatgattgcatattagggattggttaggtatgattgagatgtagatggaactgtcaattttcaatcccgagggctcaagtgttcttaacgtatcgttttcaacttctacgcctcgggacaaaaacccttttctagttatgtctttgtagttgtacaacggtacacccaaaccatatcacgtgtcatctcccttggattgtcaccgcacgagtgggctcgaatctcatgttaaccactacttaattcatattcgtgtcatgtctatgttttgcctttgtaaccatttaatatggaatattggaatctatacaacgtgaccttgcccacttttcttctttgtatatctcggtagttctgatttttttcctgttaatactaaatatagttgcttaaggttaaagaaagacagcgtaatctttatttataacctttatataatccgggagtttttctattttagaaagttaaatctaaggtttgagattatgttcgaataggataaagaggaaccaacaattcatctgacctgaaagtatctagatttttaagatagattttttattttattttgtggactaatcttctcaaactttggtttcatgagctaaagtgttattcgttttccaatttttgttttgttttctttcatgatttataacatccagccaaattatagtggattctagattagagaaaaattatgattttttagaaaggtaatgggttagaatccctttcaaactccgggtcaaactagtatgatttggttgatttctttactcctaataaattagtatagaacaatttattctacttcaataaaactattggctccaatctccaaattgctcgtaagatatatttctttgacaatgactttcttagaaaacaatacagataagatattatagaaactcactaactgaccaagtgacttgtttgcaccactgtactttcatgtcttgatccgcaactatctgactttaatgtcttgtctcaaatttctcctgctcatttagctttaggtagcatatataatccagctaatttcattggaaaccgatgaactagtaaatttaaatcctgttgttttttgggtttatggttcatattaaatccagaatttaagagtatttttgtaatgaggttttgtagttttaatgttttgaagaatcttggaattacgtttaacacttcaaaacattataactacaaaacctcttttgatgaaagtgattatagaaaagatcatttaacttaacttacataattaatgattaaagatttacatgtcatggaggagtgactttgaagctctgcatcaaaagataatgacactaacacataactcacaaaattaaactacaagtctacaattgaaattaacgggcttacaagcacaatatatacagactgtctgattagttggtccaaaaaaaaaaaaactgtctaatgataacttttttaaaataatataattgtgaagttttatatatcttctataagaaaaggtaaaagaaaataaaaatattcgtgtaattgataagataaatatttagaaaattttcaataatgtttattttttaaaacataattaatataatggttcttacacaccacttcaggtgaaaccaattatcaacgataaatagaatactcaactggtaaacgagtaaactcgtcttgtgtcttatgtcacgaaccagttaaaaataaagaacacatcttctttacatgtagctatgtcgtacgtatgagtttggtcggggccgagcagtaagatttgaatcataattatttttcaacatggtggatgaaatacaaacagtaatcacagataaatctttgaggaaacattgtcttttcttaacaaggtacacatttcagcttgtagtctactcgatttggagagaggaaaacagtagaagacatgaagaacctccaactccgccagcacaactaattcgaagtctcgacaaacaggtttggaatcctctatacgtgaacaaggaaatagactatgtgacggctgtatatatggagatgtttgtttcaagataatcaacaaggagactagcgttgactagaaagtttgcttaaaatctttaatcgaccgatgtatttgctgtaacgacatcttttttttgaataaattttatattttataaaaaacctatttagtatacatacatatatacatatatatttatattcatatatagaaatttaatggagtcatgggttgtgtgtgtggtttgatatacataagcataaagattttcaaaaatgaacgacaatatattaaatcacaaaaacacacactcgaagttggaatccaaggcaacaagagacgataggtccacattatcataaatacaatcaattaaatttcctacaccttatcagaaagatcataaaatcaaatgagcccaccttctccttcaattaagttcttcacccacgcatttagtgggtcacacaaactcttattacttgtgtccctccaaaatttctaattttttccgcattcaaaacatttaatccaaaaaatataaaccaatcgtaatccactaatattaacgtatgagtatcgcatgatacgtatattcacatactacgaccttatttaatgatgaaggagttccatatcacatattcacatcaattgttatataaaacctaaacacattatattcattatatcattccctagcaacttgttcctcattctccgcaaatcaagcatagaaagagactcttggagatcatccaagtatccgattctcagaccctaaaaatataatgtccatgaaagggatctcatcagcagagtcagataagctctctaggagaatatctttgacccacaagcgcaattccgaagagcttgacgtgtttgaagctgccgtgtacttcggctacaatgaagcctcctccggtgaccatggacatacacaaaagtatggctataacgcagcgagagaggagaatccgaggagatggggaatattaggaggtggaagaagaatcagcttggatttgcctattagatgctcagaacaagtgtaccatcttcaacaagatcatcatgagaagcacgaagttacaacaatcaaggagagacttggtaacgtgagacacaagcaaccgagttcaccaggtgggaaaatcgccagcttcttgaactccttgttccatcaagcaggttcgaagaaaaacaaatcaaagtcaaagtcaaagacaaagccaacagatccagaagtggaagaggagatccccggaggaggatggatgaggaggaggaggagaagcagtatcagccatttctttagctcaagcagatctacttcaacaaccaccactaccacggcgtcatcatcttcaaaatctctgatttcctcatcaagctcgggtttcagaactcctcctccttatttgaacactcccaccaagaactacaagcagttcttgaactacacttctgccacaaaacaagtgggagaagaggaaactaagaccaacaaagagtactcttggctggacgagaaactcaaggtgatggagagcctctcggagaatcagaggatttggtcggatgatgaagatatcgatgatgataggagaataaagagagaaggagaggatgatggaatggagagtgattcaagttctgatctcttcgagttgcaaaattacgaattatctcgtggaggcttgccagtctacgagactaccaatgtagctaacatcaacaagactcatatataatttaaactatcttgagtgtcatcaactccatcagatcttggtaatgacacccataaagcaaattgttttcttcgatttgttcttgtctgattgttcataagttatatgtttttgggtttcttggatttgtttgtggaagctttaatgatatttttttttgtatgagattatttgaggttagattagaggaacacatagttttttttgtctatcacatggttttttttgtttccatctctttacgtgtattccttgtaaaataaaatttgtacattattgttggtatattaattatcaaattacgtgcagtaagaaattggagaatttcgttcaagaacttcgtcacttacatattattgatgagcaacatttgccgacaggaaaaactaagtgatgttatatatggtgatagtcatttgcgtttgatagtcattgggataaagcaaacataattaaagaatgggaaccagataattatatatgggacgaccaaataataaagtttggccggccggttaagttttggctacttgtttttttcttacatttgttggttagttataagtccattttttttttgtcgtcgcttacgagtcttgcatgcaacttatggcgccactagttctcaaattaaattttgtatctataacatgatcagaaaaagacaaacagacacaaattggggaccaacaacgatctccacttgcattttttcatattagcttaataaataatattagatgttccaatcttcaagtagaaagatctacacacacaaaaacgaaatcttgagatctagtattttgagtccaatagtagtcgccgaactaactagagaactataattaataagaattaattagagaaatagaattattaagcaaacaaataatctaaaacatatgagaacgcatgataatccgaaaataaggaggtcattttttagcaggtccaaacttaagttgtttcgaaccttactgttaaagaatctacttgcatgatcattcctaaacatcaatatattattataagaactagcaaccaataacttaatctagtatcgctagactttttttgttgtcctgtcacgagttgtatcatagagcttcgatagaaattgacaaagtataattagtgttttggttgaagattgatttatccttaaaagtattctgaattgcatgctttagataattgtattaacaaattaatcaaggacaaaaggatatccaaaagctcttttcatgcatagattgcgcttgcttttagagttttatttattaatgcatgcataaggcataaggagtactatagatatatagcgtttttattttttgaataacaccactatatatatagcctttctaaggataattataaatgtattggtcgtacgttagattaatatccgactaaaaaccttttttgattgtaacttaaacctcatttaaatttgtgtctgtttactgtcaaagatctgttgaaattgaaaatttgacttaagaaaaaaaaaactaaatagtgatacgaaatacatttaatgaaaattagtcttttgtctcatgccaacaaaagataattaattctacttcaatcacacactagcttggttaaaaaaattatatatcttgttgtattcatctcagaaacactgtaattatgtatatgtatgtagggagatgtttttttttggttttttttgtcaaagacatatgtagcgacatatgctttttacttttaatatttcaatcggataaagaattttttgtaagaacaaaaggtttactaaataaaccgaacaaagcagataaatgtatcctacaatgaattcatgcgcagtggcaacaaaaagaaggaaacaaaagaaaaatactcatgacggtagaaacaatgatacatgtcaccaatatagactaaagtcgagtatataaaacgaatgagttaaaaaaaataatgaaatgaataagtaatacattgctttctcctatcatctaatgggtggagggtccaaacatgtgattatcataaagttgaggtaattatgcaaagtaaaattaatcttacaaataaagacacttaaaatagtatgtttggagttttgttaggtgagataataactaacgtcatatatgttgtcacacatgtaatttcaacaaatttttatttattattcgatttggaccgattatactaaattcaattgcgtttcggtattattagtcatgtggttaaagaaaattccatgtggttaaaggaaattttgtttggatcacaaaatatttggttcagtttttttccttttcttatgtctaatttgaataaaaaacaaactctggtcttcgatctaaaatgtaaagttagaacctgaactttctatcgttctcaaatacaatgatagaaatcatggccaatctttttggtgcacactccattgtctgcactctgcacagtaactgttacatcatgattcatggaatagtatgtttgaaatcttttgagagttttcgtgaaaatggaagagaccccgctgggccgtaattaatgggcttgaaatacgtctttgctatgctacgtaaattgatggacctggctttgcaaaattggaaccaacaaacaactctttttcacatatccgtttgttttaattttttaacttttaagtctatgatcagattcagatacacacataatgtacgatcgaatatacttacaacttctacatagtaatatatgagaaccgatctaactatataaacttaaaaagttataattttacagaagaagtattaatagcaaacaagtgttaagtaattaggacttagctttagattccatcacctgaaaagtgcggttggttggccaacaagatatgctctggctcccaccaaaaagaaaaaagaaaagggttgattttgtaataaagcaaaaggtttgggtagcgtcagaaggctttgtctacacacgctccaccaccaatctcttcaactcgctgattctctaatattttatttattctttttgcaaccccaaagtttctttttcttttgaggaaacccccccatacattcttcttctaacttatgctttaatttggatatatattcttattgaaaccgatttatttaagaagattaagcccttaaacaaatgttttcaaattgctatataaaatacgcttccccatgttgtgtatttcttttttttcttaatctttaccatttcaaagccgccaacaaacaaaataattaaccaaaacgtgtttgttagaatataatctagaatataacccaaaattataaactttcgctttggacgatgttcattgtgaattctaaattcttcattggttttgattgtcgtcaacatatttatatcatcatttaacatttgttcgagatagtgtgaacacataattttggctgttcgtctacagtgtgaatacatgccacattgccaccgtattatttgtatgttatttgtgactcaaccaagattttgtttaggtgctgttccgaaagcatcatcaaaaaaaaaaatgtgtacaaagtttattaggttagttttaacatagcaataacactaaactaaataaacctaaaattagttttatcactaattttgatggtaaaaaataggaggcatgacgtcaacttctccattcttaaattcgatttctatagaaacttttttacttctactttttttttttgtttttttacttttacttgatcgaacaaaatagtgtcggaaaacaaacacaaataaaatttacaggatgaagaatagaaaaagaaaaaaaaaaaagaagcaaaagagagagagaagtggagaagaagatgggtttagtggaaatcatgttgaccccaaacagtatctgcttcgacgtcacctctcaccttattccttcgattccccatttttcacttttcttatattttctccacctctctgtctcttttgcttgcttcctatacacagttcttctctgttcctctaatcggtaagtcttattcttcgatcctctgtttatgatttcgttcacctcaattgcattagatggaagataagaaactcgaaaatttcgtcttaatttatttgttccactgatgatcatgttgtgtgattgctttcttgataaagtattgatttttatctttgtttcttgttagggtttgaatcttttcgtcaatttctatctgggttttgtgttaatcgaaggaataagtgaatcgtcgtcttgggttttctctatttagaagaaagcttcctcctttagggtttctgcatcagttattgaattgctagttgtcgttgaagaaagcagaaattgattatagtgttgctgatggattcttggagctacgggagaagcgttttcatgtcaaatgaaactcttttaccttgtgatacttttgctaagaatagaagatttgaacagagactctctaataatgatgatgtgttgatttctgacatggctggtaactccaatggattcagtgctgtttctattactaaagttgttcctgaagaggaagatgaggagaacatatcttcttcttcaaagttctctagtcaggaattgaataggatagatttcaaacttaggagctttttggatttaggaaatgatgatgatgatacatcctctagaggttttgctctgccatctaaaaagtctcgagcttcaaacttgtgctctcagaatcccttgtgtcaagtttatgggtgtagtaaggatctgagctcttcgaaagattaccacaaaaggcatagagtttgcgaggctcattcgaaaacttctgtggtcatagttaatggtcttgaacagaggttttgtcaacagtgcagcaggttttattctttctcctctcaagttgtctcatgctctgtagtcatttcaatgttcttgatggatcttgatcgtttgtttcttttacctttttcttctgttcaggtttcatttcctctcagagtttgatgatggcaaaagaagttgcagaaggcgattagccggtcacaatgaacgaagaaggaaacctgcattctatttcctaccgggtaagcgccataagcttcttcgcacctctcaaggtactcactctctgccttttccctatccattgatgtattgaattagcaaactcgtgcaaatttgaatctattctgtattttatgatcttccatagatgtagtaggcaacaagtttctggagaattcatcattggtattgccagagtcatttcctggtagtctcttatacagagtaatagatgaagacgaccaccgtacaagtagactcgtgagtttcaaagatgaacctacttgttccatgtttcctactaatgagcaaaacagcagcagaacttatgaatctaaaccagcaatttattccacggaagtatcctccatttgggacttacatgagacggcggcatcacgctctactcgtgctctctctcttctgtcagctcagtcccaacaacacttgtctaagtttccaaacacaacgttctcaatcacccaacccaaccaaaatctcaatcactcatcatcaactgactatcatcagatggaacaaccgttgtggatcgatcctggcaagaccaattctgctggttctagttcttgtaaaggaaaaggaacatccacggttgatctactgcaactgtcatcacatcttcaaagaatcgagcaacagaggaattacactggtgatgtgaagcaggaatataatgagctttatttccctggctcctaataaaaggttacaacattcttattcctttaaaccggttcgagtttcttgagattgttctgcagaaggacaagacaagcctgcatggcttgattagtttgtgattagatagaggaattaagaggatcagatcatgttacacgtattattgtaatttgtaactgttgtgttattattcaccagtcaataatgttctgaagaaaattgcttcagatatctatgcctacttccttttcacagcgttacagacaatttgtatatatacatgtaatgaatattcgctgaaaaagtgaatttttacttttgttttgttttgttctgtacactcacgtcatctgaggactgatctgagattctcgagttcgaagttacgatgttgaaagttgcaaatcattggggaaaagaaaaagtgtcccagatggaattaaggaatacgcatataaaattttgataggattaagacaaataaagaccagacataaacgtccaaagggacatagcaagtgacgttactttcaaatctaaagacagacagaaatataaagtcataaaaactaaggcaacatcattttctgcaacatgacatacataagaaaattacacagaagaacaacacaagatgagaaaaacgacgcagccactcgcacacgtgcatgcgtttgttatttttaggcttcttttcccctgagttttgttcacttcttctcaccgaatcccaagccctaattgaacaaaacattttaaatctttatataatgtatataaatatgtccttatgcagacttagtttgtatagcttacatggatcatgttgtggcctccggaagtaatggaagtaggagagttgggtatgtacttagcccactgtttgtgacatttttcatttacacaaacgaaattgtgaaaaaataatattaaaggtgacaacaatggttggtaacaaaaagagacttgtcttacatttttggcagcagcactgaaagcttcacggtgtggtatttccggattggcacttttgatgcgttggatctcatccctttttatattttgtttcaaaaaaagatgaagaagagtactaaattatatttattttttatgcattaaatttcataattaacttggaactaaagagtatatgtcaaaggttaaacctcatgaagcggttgtatgcagatgggagcctctgcttcttctcaggagctacaataccaaagatgttcaacagataatcatatatatgtagatagtgattaagtttatagaagaaaaaggagtcagaaatggtaataagcttaattacgtttgacgacaaagggaggtgagggagatgggggctggtcgctggaggtggaggaagaggaagaagaagagcttcccttcttatagtcacttccaccaaagctctgcatctgcttagttaaaacaaagattggcttagtatcagttttttgtataaaaagaattatactcgtatgtataactataacacaagtgttatatacctgaagggtgaggctaacatggccttgaagaggaggagttgtggtgagaaacgagaggttaccacaatggccgcatttcaccgttaccgtgtcaagcattctcttcaatggtatcccaacctatatatgtgtgtagattcggtttacaaattagctcgaaaatttgaagaaatatatatatatataacataaacaacaatatgtatagcttagcatgtatgtgatattatcaacatatatagggtcatgcaagtatatatatgcttatatatcttcttatatgtaggtaataatttaccgcgaggatggtgttgcagatgctacaccggacgtagtagagatgttcggcttgaggggaagcccttgaagccgtcatggttggtttctcttctaggttcatggtctttagcgaatggattgaaaaccgctcttgaaagaaagagagagagagaaagaatcagaagaactttgtagagttagggttatgcttattttatgagttaggaggcttgtatttatagaacaatcatagtgagaccatgacatatatatatatagagagagagagagagcgatacagattgtcaaagtgttggacgtgtatatgcagtccataattgcatttttattgtttattttaacaacatttaatatcatcttatcaaaaaaaaaaaaaatgaatatcttaaactaatgacttctggtgtagacacgagtttctaatggtgacattatgtgttttcttttttttttcgttctttttttttgttaaagacattatgtgttttcgttggatatttacttgctatatattctattttgtaatcactgtaaatgttttaaaagataaaacaaattggatcaacaagttcgatgatattaatctacgtttccgcataaaatttctctggatataaagaaggaaaaaaaatgatatcattaagctggctagggattgcaagaaaaattacaaatgtatattaaactgatatttagaaaaaagatagaagaatttaatgtaaaaacaaactttttaacaaaagtaattttatgtcaaatcatatatatgaattaaattaaagggaccggatctaggggtttatgacttttatctatgttgctactattgcagatgatatagtacatgcctccctctgcaaaatcttgcagacgtatttaattttgcttcaaaaatatcaagaccctaaatgtcactcctcgtacattagtttttgctaaaataagctgtgttggacattattcaaccatgtcttcgtataaatatgatttataattaacaatacaccttaatcatgtgtaataaaaataataactattaacttatccaaaattactcaagagagtgaaaacaatcaatccaattaatactttcgtagaataaatattttcaaacaagcatatacatatggtgtaagataccattggtttaagatcgatatatctatgttttcactttatattcactagcctctacatcgtacagatattaattatgacacatatgcgatgcaaaaagacaaaaatagatgaccaattaagatattaaaattatatattaaacaatacatggtgtgaatatgattacatttattcaagtttgatgccagcaagccttgacttgcccacatgttataaattaagaatggtcctttcctgatcttttgatcagttttttttttttttgtttctctcataaaattttcacgcaaaatgatttcactgcaaaactgaggacaaaacttgtcatgattcacaacttttttcttcatcgtgaaattttcactcaattgcattaataagttaaatataaaaatcgtttaactgtagagaaacaaccaaaacaatggatcttcttcagaacatccaactatacatacattggactcaaaagcagaatctcttgatttgccacttatatttattttttttgttaaaggatttactttatgtttaaggatgttttctacactgcactacaaattttctgtttgaggttatgagggttaacatatatataaaagttaagttctctatactgctggattctgagttatgtataatcattttgacatgagacaaactattagtccaatccataaaaagagtgataactcatcaacatagctttttgggagctatacacgctttattgttgaaatttgagacagaacaagcatatatatttgttggcatactaattatagagaagatggattaagaagtgtgggctttgagttaaatcaaaatcaatttaaaaaaaatatattcaaaaagagaaacttgaaaagatagtgaagaaaggaggagctataggatggattccatcttttgtgcatgcactgcccccacagggaaattggaaggagacaagtgatcaatcacacgtctctttcagtgactaacttttttgcattcttcactttccttagatttcctacttcgacacacatatttagcttacttacaattttatttgattagagttttcctctcaatgttagaaccaatatatacatacattgaagtttgctctcaaagttagaactaatacataaatagattaataaaagtcatggatttctttagttaataacaacaaaaacaaaaacaaaaaaaacaagaagaaaacatgaataactaactatttttatttaatatgcttttaaacatatattttgtaccactgtacggtagtctaattccaaaatcaacaataacaaagtctctgatcgatatagtatctaattttaaaattttattgatactttaatttgcatctaagaaactttaactatggacaatgagaaattatcctcaagttttatttatgtatccatttttctcaatagaaaattgcatcataaaaaaaaaaaaaaaactaaaccaaatctcatcattggcattaagagacaaatgtgaatattttcaaattttgacttgaaacatcctagaccagaggtgtaactgaaaaatttagaatatgatcagttgaaaatagaagattaattagttgtacgtaatagggtaatcgtggactagaaataatgagacgatatctatatctgcatcttaaaaaggtgaccgaaattaaattatgtttattttaaaaaaggttggggactatcaactatgactgtgagagatgggacgattgccaaaaaagggaagagagctaataagaaattagggtttagtcaggtttccatgctcgtataacttcattactccgactctttaaagcgttgcctttaccctctcctctagctatctagcaatttaatactacccattattcatgcatccactactttacgtacacttaatatataataatttttctatttgtcatgtatatctcaaaatatgccctctttttcttgtcgtgtactaaatttttcttgtgcctaattatcatggcttagtcgacttaatattgaatgataactaatcaattagcttaccggttatgaggagacgagcgtttatattttttatgtttgtgactgaatcattaagaacttttacatatcatggtttcggtgttcaaaactcagattgacaaagtaattgaccattatatatattatggtgttttagtggtacaacataatctaaataagtggaggtgcaacatctgtaaacttccctgagcgatctttttttctttccctaattagaaaaacaagaaattctataatttgaaatgaaacgaaaaaaagtcaaaaggaaagttcaccaaacccacttgagtttaatagaaacacacaaagctaagaagtatcacagttcacatcacacgtagagtctctactcattcgcagcttctactcttcctcttccggaaaccctatcgctctctttctgatttgacttgtctttattatttattagttgttgttcctaattaatcactttctcttatgtgttttcaatttagacaacgtaggctttaatagttgatatttctcgtaccagttttgaaagttctcttattctagacattaaactttattgatcttacgcctccatttaacgttttgctttatggtttttgattagactaagttatctgtttatttttatttttcttctattctaaattttcattttctcatgtttgttttgtgtaggtatagtttcttctatatattttaaatattagtaagaaattttcctaacctcgatcggttgtcataaatttgattatgcccaaaatactcaaatgttgttaataccgatatgacaggtaaaatgaaatctaaaaatatcacaaatgagtactttttatgtgtactttgtgagttaagtcccaatacgaaaatgaatcataatgtacagtatcgggctttttatgacaagagatcctactaaactcttgtgggctgaatacaaaggctagcaaataagacttaaaagaaactttacaactgcgaatagacaaagggattttaaaactgccaataaactttataaaatgaactaaattcttctgaatttcatacggaaaaacaaaataaacttatttttaacacatctcaagtcttaaaaccatacaacaaatcatatcaactaatcaacatttttgaaccttttcgtcatcattgcatcgcatagccttgccgcgtctacattatctctaacattatgaactctaatgatattagcaccttttagtatcccagcagtaacacaagcaacagttgcagcatctctttcacttgcctcaggacgaccacaaatatctcccaaaaatctcttccttgaaggtcctataagtataggtgcatgagacaatcctatactcttcttagccatctcttccctgatttttggtagctccatgacaatatctaaattatgatctattcccttagaaaatccaattcctggatcaatcataatcctccaagctggaatcccagagagttctgcttctcttactctctcataaagctctgtggcaacatctttgcatatttcattatactccaaattctctttgttttgcattgtacatggatctcctctcatgtgcatgatcatataaggaacatcagaatccgcaacaaccttatgcatgttctcgtctaaacttcctccggatacatcattcaaaatgtcagctccatttcttattgcttctaaagcaacctcagagttaaaagtgtccactgatatgagctttcccttcatctctgccataccgcgaacaacttttaaaaccggaatcagtctatctatctcttcttgactagatattcttgaggccatcggccgtgttgactgtgcaccgatatcaataatatctacaccttcagatatcatagaccggacccgagaaaccgcggtatctaccgattgaaacttacctccatcactaaagctatcaggagtaagattaagtatacccatcacataagttttcttagaaaaatcccataaatgatctcctattggtataaccctttgtataataccgtcttttccaagcaatgactcaccacctaaccgctcccacgcttggaaaattccacctgaatgcattgagagtgaatgccaatatgcaactattttatcattatcaatatcttccgttccaagcaaatctaccaaaggtgctaaaacaaatggtctttcccagattctctcatggggaatgataagtttatcagaaattatcttgtgctttccatagaacaatatgtccaagtcaagtggtcttggtccataccttaaaccattttcttcacgacccatctctttctcaattttcttgagaacgttcaagagttcatgaggtttgagctttgtgacacctcttattgcagcgttgagaaatcttggttggtcggtcacatgaacaggttctgtttcgtacaaacaactgtgtctggttacactgatcccatagtctttcatcaatcgtaaagcttctttgaaattattcattctgtttccaacattgcttcccaaagctatcacgacttcttcgaaagttgttgtttccaaagatgtgaaatctgagtcatatacaaaacatgtttcgaaggtgaaatatgattcaatacttaacagaaattagtgtatcaaaacgtaaacgctgtttttttcaacgaaaatgaaacggatgaaaaagatacgaacccattttagaataggttcctccaaaatatcagtattgtctgcttcgatctgaccttaaagtatacaaaactatgagtttagtcttagataacaacgaaacaattattagaaacacaaaaaatgggttctaatattttaagaaccaaggaagtaaacaatacttatgtatgagagaggcaaggtggtagccaattttcacctactttttttctgaacttgttgtgttatccaagtaccttctgtctttcacgctcgtcaaaagtcagcttctcttttgaattagatatgaagatctagaaaagaaaagaaaaaagagaagaaaactttgtttttagagagattttgaaattggtaatgaatctctcataattttgaaattggtagtgaatctctcataattcttttcattatctattctatcttttaccatttaaacatatatttggatagatgatggaaaattgtgtgttagtctccagctatttcattccatttttaaaaaatatcaaaattttcatagatttgttctgactacatcaattttctttcattccactcaaggcactcatggttacattaccaatagaaattaattaaccatacaaaattctaattattataactccagacgatattattttcactatatagcaaaaaatagccgttttaccataacatatatacagtctatattttttgacgaaaaataaataaatatacagtatatatatatatatatatcctcgtgttagaattgtattaagtttttcatcacaccatctttaggcattatttctatgccaatcaaatcatttactcgtaaatcatcatagtaattatgatttcagttaatcgtaagttttttgtagctttgtgatgatgagccaattaacttcacaacaaaatattttccttgaagtagttttttaatagcaaacgatttcacgaaaaactttacataacaaatatttctacctacattaaaagaatgtcatatagacaatactaaattcactagctttaaagaagaaaaatgagccgtaaataaattatagtagacagaatagggacatcttgacgttttagtattttgatcatagaatgcttgccgtttcgttaaagcgctaaacctcctcctcatcctctcccagctagctcctcttgcggtttcagagcttaaaccccaatctccctcaaaactcataaacatattgctctcctttgttcatttctgggtttacgcttctttcgactttatgggtttcggagcttagttttactacaatttcgtttggaaaagagctcttatttgatgttcatggcgtctctctccttcacccaattcttatcattccccaggtccctttgcttctctctctctcttgttttctaaccttaggaaattttagtatatgggtttctatggatttggcgtagaaccagtttactgcccaaaaatgtgcgaactttaagtttagctcatcttatctttctacagaagaatggagtaacaatgatttgaattgagggctatatttgtctttctgtttgaaaatttcacattttgatgtaatggttttctcatagctgtgctttgattttggcagatgcaatgcagatgttccttgtctgctccagtcgcatggttttgtgaagtttagaggtgaaagatggaatgggaaacaaagcttttctatggctgctggtaggagaaagttatcagagtcagcacctcttgaagaagaaggtaatgatggaaacggtgcggttgtgggaaagaaaccatctaaaagtgttaagagaacaacgaagaagaaggttgtggttaaggatgaaccattagaagaaatttctgaatttttggttgataatgatgatgttttagacaaggaaagcattgtctcagctttgaaaccaaaaaagacaagaactagaaagaaaggtaatgacttttaccatttctgagctgatggttctcacttgatgattcacgagtacttaatttgaattcgacatatatacagctgcagcagcttcttctgatgtggaggaagtaaaaaccgagaagaaagtgagacgaaagaggactgttaagaaagataaagatgtggaggatgatttagctactattatggatgctgaggttagtgatgtcgaggaagcattggctgttgaaagcactgatacagagagtgaagaagaagagattgatctgagtaaacatgaaggtgaagatattagtcacacttatggatggcctcctctcgtgtgttgctttggatctgcacaacatgcttttgtgccttcgggaaggccagcaaacaggctattagattatgaactacacgaacggatgagagatgcaaagtgggctccagagaagtatatccgggctcctggaggatgtgcaggaggtgttgctattgctcttgcaagcttgggtggtaaggttgcttttatgggcaaacttggggctgatgactatggtcaagccatgttgtattatctgaatgtgtgcaaagtccaaactagatcagttaagattgatggtaaaagggttacggcgtgttctactatgaagatcagcaagagaggtcgcttgaaatcgacttgtattaagccatgtgcagaggattcactttcaaaatctgaaatcaacgttgatgtgctcaaagaggtaatatattgtcctggagatttggaacattgagtttttggctctttttcttgttcaccaatctcttaactttggtgcaggcgaaaatgttctacttcagcacgcattctctactcgataagaagatgatgtcaactacgatacaagccatcaagatatcaaagcaactaggcaatgtcattttttatgacttgaatctccctttaccactatggcactccagcgaagaaaccaagtctttcatacaggaagtgtggaatcttgcagacgtcattgaaatcacaaaacaggaacttgaattcttatgcggaatcgagcctactgaagagttcgatacagaaaacaatgacatcagtaagtttgtccattacccgccagaaactgtggaacagctttggcatgaaaatctcaaggtcttgtttgtgaccaatggcacttctaagatccattactataccaaagagcacaatggtgctgtttccggaatggaggatgttcccattactccttttacaagggatatgtcagcatctggagatggcatcgttgcaggtacattttcacttgtgtcatttgtttttcatagcaatttggaagttatgcttgcgattaactgaaccacactactctctatttcaggtctaataagaatgcttacggttcagccagatcttatgaacaataaagggtacctggaacgcacagcgagatatgcaattgagtgtggtattattgatcaatggttgctggcacaaacccgaggatatcctccaaaggatgacatggaagaagaagaagatgatgaagaagaagatgaagtggaatcagatccaaacggtataagatcgataacagagaaggaatacagaacctcaaagccttatgatgaaccagatggtccatacgttatgaaaccagtagaggaaagggagtacaagaagttagagcttgttggctcaatgtttgaagatggtagtttatgattttcataagatttgataatgtttctgttagtcagcttttttttcctgttcacatcttacaacatcttagtagtgtgaatttttgtcatatgttttgatatctcactcaccatctcaactaatacaaaatcacttgaaattatccggaaacagcaatgtgaaactgcagtgacgatgaacttactttaatagcaactctacttctacgtctacttaactaatccaagtagagatttatcttcttgtgatctgcgaaaggcagtgtgattctcaagtccttttgtttccggcttaacggtctgcctttgctttcgggatctctgttctcccttacatctgctaatttccagacacagttatctgattctgcatctatagactccaagaggaacactccactctttactgctttcctcgagtttgtttcttctacatagcttactgtcattggcatatccttgaatcggggcaagtcctctgggactctcagtagcctctccgctcctggagatgacacctacacagaaaaaaaaaaaacggaaacaaaattttgtaacaaaactgaaccaagtgagagttgattcactggggaaagactctttttgacctcaagggctagatcctctgggattactttttcagccccagcatcatctagtcttttcttaaattctcgactaaattcctcaagctcatccatggtaggacatccatatcttttttgtacaataaaaaagaagaagctttcgttaattctcaaaacatactgctcttttgcaatggtttgatgatatagaagggtgaagaatcttactcagtggagagtttgtctagtctgacgtatatatatccacgcggtgaagttttgaaagcaaacaattccaagtctttctcagactgcttcaaaacttgtgcagctatagagagaactctttcaccccatgctacacctttaagaacaattccaccaccatctcctccatcaccaagctgtaaaacagaagaaagattagcttataagaatctaagaaacagagtggcgattttgacgtgaaaatgtagtagaaagagatatacctgtgattcaacatcctcatcttcgtcttcttcccaatcttctatgacctcaacatcatcagttgctttatctgccaatttgattggaagcaatgttttatgagaccaattagtatcttatgacctttatgaaataccagattctaaggacaagaaaaagcattaaaatcataaggtcaaggaagcgagagagcaagcaacattgagaagatacattttttaggcaggagacattttaacaaacaccttaaagacaagaaaaaggcaaacacacagaaagaccgtaaacaaatcctaaaacccagaaaacagagaggcagtcaaagaaaacaaggtttatttattttatcttacattcaaaagtgtcttcttcgtcgccattactaccggcggtttttggcggtcgagctgaaggagaaggagaagaagacgaagaagaaaacgtagagatcgaagaagagaaaggaaaatagcgaggaagagtaagacgtgtcgtcgtctttggaagtagtaaggaagaagaaaaagttctaacggagatacaagtcgccggtttggtaaaacggcgagaagctcggaacaaagcagctacaaagagattttggtatctcgccatgctttttcgaatttcccacagagacacgacttgtaatagtatttattattaaacctaaggggatactatttatacgagtgttacaaaatccgtttgttccattcaatcttctagcaattgtgctaagaggagacaaaattgattggtttttaataaaaacttctaggaaaataaacatgtacttgctgagacgacctatactaatacaagagtagcaacagatatgaacacaagactatttagaggcggagaatagtgcgaagagtatcgcacagattctgaatggtttgctgctcctgcgttgcttgcaattcctgcagcggcatttcctcgtaacacctgagatttatgcaatgggtgtttaaggtttttagccagacgttaacaaaaatcactaaactgggtttactattttcttaaacgtacgctctgtggtaggctaaaacttgtgcaaggttcatcagagaagagcttgttgtcagtctttggtatacgcttggaggaagaggcatctgcatccatttcatactcccacagattaataaaacattatgattcacattatatagagttcagagagagagagagagagagaaagagtttcgacctcgttttgtccacgtcggccctttttggattggggatcagaagaagtgaagagctcctgaagtgcttcgacggctacagttccattcccatcttgttgcatgcctccgatcatgttctctgacaagagtgcgattggggatatatctgttgctctcaagaacggtatcggtactgtgtttccagctgcgtagattgaccataactgcaggaaaggtgacacattttaaccctacaacggcattgactagactctagcacatacacagcacaaaactaactaaccttatcttgcaaagcaaaagctttcctgccaacagtttcatttttcaaggtactaccacttgcatcactgccaccttccatctgtgttccagctatgttatgtagcttggttctatgctcatgagatgaacttgcctgcatgctctgtgaaatcgaagcttcaactggaagatcaatagccggaggcttctttttgtcatgtatcctagcaaccattatcaggttaaattatgctcaagaagcaaattcatcatcagatcatgattgttatatttccaagtaactttcttttcaataaattggatgatctgaaggaaaatctaagtgtctatttatgtaagtagatataccccagtaaagtaaaacgaaagggttacacagataaaataccatgagtcaggtaattcttctcctgggaattcgcgaggaacaccttcaaactgagaagatgaagattctttttctctgacaagctgagacctggagtcactctcctctgtctcatcctcaccatgaacgatcatagttccgaagtcaccacctgatcacatgagccagtgcaaacataaagttacatgcttctgaaaccatgaagggagcaaattatatccaagctgtatgctaaaaaggctgctgaataaaaatcatcaaaacatcatcccctagtgttaactatacatctccaagaaaatgcactcaacaattcttatgatggttcgaaaatgcagattgccaacttgtaaagcactacgaaacaggccgtggttcacagcccatgtttatagaagcatactgattagtcaacaacaatacaccatttggttgagaattccttatgtagaagtatgcaatatggacatagatagtcatgcatataatacttgccttctccagccaacacagtgttgccagtaatatgctgccgattcagggtgctggttagaggtgcttcggtcgaattttgaggaggtttagatggaacagtaattccaagctcctcgcttgattttggacccagtgttgactgttacaagagtagaatataatgaagataattataacttgcaaagatattaggaaagaagatgggggtaactaagagagtggtaaccgtttgagaaaaacaatacatacagtgtcctccaaagaaggtgcgacaacactttgcgcttgcagagccattgtagctctgatttgtctggacttctcaatctttggcgacattgcagaagccccagttttacatctctcaacaaatttgtgctgaatttagtacgaaagagtaaatggcattagaagaacacagagaatataaacactaaattgcatgccagctatgaaagtgatggtaattctgacaactaaagctgaagatatcctagtattgacaagatagagttacagttaagctgaaaagaaaaaagtaagaaggaaaaaagagagtattgagatacacatactaacgatctctggcgtacatgcagaagactattatagttaccttaagcatctcagctgcagttgggcgaagacgtggttcctttgtgaggcactttgcaacaaaatcatgaaagaccagggacctgcagagagtagcaaccaagagtcgaatattccataagatattgccaagacctcttaacaagaattgcattactatgcttcagagcgcttaaaggtcaacgcttttgtacaaatgaatgctgccaaccacatatataagatttctttgccagtgctagaaaaattattaaaccgatgagaaaaatggttctggagctaaataatagaccatgaatcgataaagcactgtttgtcacatactgtggatatgcaattactacagcacatgtggatgatttggacaattttcttctgcttaatgataatcctcgtgacaattctaaagaggttgaagacataccatttttctttatcctcgagcattggagctggctcgatggatatcatgaacaaaacctaacaaagacagatgtttgacatgagatattaaataacgactatagcacgatgagattagtggccatcaagtaagcaaacaagcaaaaaattatctcttttagctagtattcaacactaacaatcaagagaaggccttttaagagtatttcaagacctccattttctagcctaataactctcatgtttattgaaaaattccataccaggtctatacagatttcattccatttcaatttacaggacaaacttaacaacagcaagctgctttgacattggtttataacagacctaaccaaaccgcttacaactaaagttaataaacggttggagccaaccacatttatagaaacccttgaaacgaagccaaactcgcactgatgtgaaacaaattgttttaggtttggcttcgagtcctgattcacttcctttcaattttccacacagagaaaaacaaaaccagtaaaaaaagggaaagactgtagagtttgcccatcctaaactcagcaaggtgcctcatcacttggaaatataattaaaaagcaagatggcttaatataccaaccctcatcggatgaactgatgatcttggagggagcccctggaaacaacacaaccaaaagtcagaagaaaaccacaggattattaagaataaaataaggaagcagcgagttaagtgacaaggggtcaaaggtgtttatcaaaatgtaaaattttcttctttttttccacaacatgtcaggcgagagctcagtacagctaacaggacattcagctctcaaaacagtcactaacttagtttgcttgcaaaatagtcggataaaaagtattaaactgttcacctaagagaaatagttccatattacctctgccatctcaatagctgaaacaccaagagcccatacatcaacctgtattaaagagtcaaaatttcatcaagttgtaaacaggaaatccttaattctctactctctagaaaactttgcagtcttagtttctcactaggttatgtatcagatgctaatttactttcaaataggacacctaccttcccatcataacgattttcctgaataacctctggggccatccaatgtggagtcccaatgaacttcaaacaagccacaacattaaagaatccaccatcaggcgcaaaaagtctataaggctttgattgcctgattgttcaaagaaagtttgacgaaataaccataggaaactttattcatataggtatttaccgtgtttcgcttcgacatagtgcgagtaagttgagctgcaaccccaaagtcacctgaaaagataaggtagcgaactttggaatcagcatgcagctgtaaagcaatataaaaaaaatctaactaaaaaccgataaggctaaggaagattcgaagctttaaaacataaaatccagcatgtgtaatagaaataacataagtaaagcccactcttcaaataggtggttatataactccccaagctaacttacccaacttgacctctccttgttcagttaacaagatatttccacctttaatgtctctatggactttatatattgagtgcaagtatgcaaggccctacaaaatagatacaaacagaagtataaggcctataacatgttgaagcagatgagtgcaaacaaagacggaaccatcaaatacaggaaagcagacatcatttttcttcttcatgcttctagccattctagaaagtgaaaaagtttacagaaattgtgtgcataccttcaacgcctcccgacatatatatgctatctgatactcctctaacgcctcctcagtaacattcataagatcagcaacacttccacctccacaatactccatcactatctgtcagaagacataaatcaataactagagagaccgtatacataaactataatatataaacgaagaaaaaaaactgattgcaaacagtaagagctgctatatccaacaaagctaaccaagcccagatgctcacccaaagataatcttctccttggtaactccctaggtagcggacaacattaggatgattacattgctgcagcatctcaatttctccccggatctcttcatacccctcctcctaataaaagtagaacttgaatcacatagagtgctttagcaactatgacatttgaacttatgttaaaggacaagcttttaataccccttcagtaagtgatatgactttcacagcaacaatctctgatgttttcaaatctcttgccttgtatacagatccatatgatcctttccctgccaatccagataccaaatttgatatagtaagcaagaaattgaaacaagtactaagggatattgatggctgatcatgattatagcaacataatggagcaaatccgatagagacaaacaccaaattaagtctatgaagctaaataggctaatttaccaagttcattgaggaattcgtatttggtggttggatcttctctagtaatgctatccggaagagacgtagtcgacatcttactgttttgctgctgcattttccgattatcttcaccgtgaagtttcgaagaagaagaggaaggatccaatttccgagtcttaccaccaaaatttgatttctgcatactcgcaacagctcttcccatagttgtcatatcaatctccttgtctttcttctttccctttttatccttagatttcacaacaaacgtaccgtagtctccgtcgtcgtcatcatcatcttcttcttcgtcttcttcatcagaagattcctcatctccgcctctcgctctcctcctaggactaactcccattcgcggtttggacgagtacggactgttcttcttactatgactactccgatctgttttcacaatcatcgtaccgaaatctccagattcatcaccgtcgtcgtcgtcgtaatcgagcgacgcgccgcctccgaaatccttgggaagacgcttgagaagaggaggaagcatagaatcgtcatcatcatcttcctctccttctccgtcactatcgcctttgtagaccattgtagcgtataaatcgacattttcgtcttcctcaggtttggctttacgtttgtctcgatctcgaccttgatcagaatcagagtcggagtggactacgaaagtggagtatatgtcaggtttgggctccggtttccggctccgacgagatttcggcgagttatgatccatctatggcgactctaaaccgtcgtcgccgggagagagagaaagagagtcaggcaaagagtaatacgtctcgtcgttaaaattaatgatgacaaataatttttaaaaattaggaatgggccaactaaaatattttgcaagctggaatattaatttaattctctgttttgtctatgacctctaaagacattactgtttcttgcataatctgtataggattcgattggtgaaataaatcggtaaaaaaaaactaacgatatcagagactgttatcgttcgaaagacatacaacaattgaagcacatatgcgtagaaatttagagattatacagattttattttttgctagggaacaagaggtttcacaaaatgatagaagtgtgacgtgggataaagaagatagagtgaccaagttggcctcagtagctagttgctaccaccaccaaagaggtaatcaagagacgagccacctcctggagctgagtgaaccttggtcgatggtcggtcctgcgaacaacaaccaaacaagatgttttagtaactgtaccataagttttagacgattattgcgttgttagcacaaagcaaaacccatcagtctatttgatcttctttcattttcagacaactaatctaagaaaagtaaagatacagatgtttttgctatccgataaccagcacacaggactcgattcagcgaaagaattaaagacataccgtgatgaaattgcctgtgttttgtccttctgcacgcatgtaattgtttgcagagttgctattgagaccagcaggaacttgtttgatgctatcaacagcgtttgcagcagcagcttgagtaggtggagcatgagcagaagactcagtttcagctggagttttgttaacggctgctagctttggagcctctccgctcccaaaaagatatcccaaagaactttgtcctccacctgcactaactccacgccccattctatctctcttgcttctctcaaatgtactttagcttatggattcagaaatatgataaaatcttgagtcagtatcatattttacacacccaaaaaaaaaaaacattacctaataaacgatataaaacaacaaaagagaattagtggattagtcactcaattaaccatactttgtttgtgaaagcttctgtaagaaaaacgttcacatttttacaaggaaacaaaaccaaaacatgaattcagacttgagagtcattaacaacttacttatcatcaccaaaatactacaatcattgaaaagacttgccaattgaactttgaaccactcatcgaagaataattcatctaaacctaacaaaataaatttctcaatattcaataacctagacctagagtatatatacaaacattctttcatatatcaatcaaattaattctacctattcaaacctatccgttgatatgcaatgctacgaacgcaacatgccaacatacatagaaaaacttctcaaatcaaacacctaagttgagaagaaaacaacacgaaacaccaatctagtttacctgatcagcaagctaaggtgattggagaagaaagggaagaagacgagccaatgagagaaagcaagaagcctgtgaattgtgatatataggtgactgataatagtaaggtgatgctaagctggcacgtcaattcaacagaacaataatcatttcactctataaaccggtgtgttttgtaactttaacctttttctttttttggttattgattttaacctttttctagtgtaatccaaaaattagtttcgcttttttctaatctttttgcattaattaatcaaaactttcacaaagtattactgtttggtaaaactgttacacacgatgaaaaagggacccattccgaaatatgtttttggttcatatctctccaaattaaaagggcaaacaaatcggacaattatctctaactttatgttttacaggatcctatgtccggttcagtttacataaccggtaacattgatcaagaagatttcttgggaggtaattgagaaatctcaacgagtatccggttcaaagactgaggacgagagaagaaaggtgcatggtcagagcctttgagatgaaaaacttgttctggagggtttgatttgatcattgcatcttggagagaaaccggtacagcgtaatcatcctccatggttttgatgtagaaccgtcggattgaaccgtaatttttctccgacacgtggagcttttcgaccactggtgcgaacgggattggtctcatcgataccgacgctaatgcaacgtcctatagtaacgaaaacaagtcgggtttagttaaaccgaattgtaccggttcagctatttattagcctaatgtgttgtgtacctttggagggctctgattaaagaaaaaatctctaagcaatgatctgtcgaaatcaacggctgttggagggttctttttgccgttggcgtacagaaatagatggacttgttccatcagatcataatttgagtcaggctgcgaatcaattggttgcgattagattttaacgacggtttctaacacataagaaacactatcacttatttttcaattttgctggttcatcatattggcaattaaatgtcaaaatttggctgcttagtgtattaaaaaaaaaatagaattaaaatgtttgaagaaaaaaaaacctgttggttaaagagatcgagagtgctttgggcattagccaacatagcagcagatatgaaaatagccttagcgatcttagaagggtacatctccatggcataagacatacaagctcctccaaaatcatgccccactaatatcacctgcacacacccattaattaatttatatcctaaactcgttggtaaattaaagtataatttatactattaataattagaccaaaacgaacattgtgataatatgaaaatgatcagaccttctcggtgggtttaagggtgtcaaagaaatggaggagtggtttgacgtattgagcgaggctagtgatgttgtttgtgtcaaaagagctgacaccggaaccggtcaagtcaacggcgtctacttggaaaccatgtttctctaagagcgttatggttttgtaccaacaccatgcaccaaaccctcctccatgaaccagcacgaaccgctttgtctccgcaccttcgacctttagctcctgatttcatccatttatatcatataataagcctcaatataggtgtcgacatagaaaaaacaatctcaatagagaatttggctaaaacaaaagattattgtaattaaccatgtgtagcaagtgctgttctaacacacacacacacacacacacacaaaattgtaaaaacatttaacaaaaatgtcattttatattttcattcaatctttttggttatttacttaaattgctcaaatgaatctataggaacaagcaggttcagttctgaccggtttgaatggttccatgaattaatctagctaggagttgtatctatcttgatcacattcaaagtatcattataacaaagtcaaataaatggacattattgtgggagataggcaaattaaatttgcttgccttgtctagaagctgattgggtttaagaacaggatcagtgcttgatctctgcctattgctagaacttctaacgtatccataagtggatttcttaggagtcaaggcgccggaaacagaacctacggaggcggctacagcggcggtaggtggctgagtgtaaacgacggaggtggagcgtcggaaaggaggagcagagttgctgttacgaggcgtttgactaaagagaatattagtggcagctaatgtttggtcttgaataagagagtctttctcatgatcatgatgatgttgctcttggtggtgtctttctcttatcttcttttttgtcttgatccctcctttcttggacgtagacgaagttgaggatccggagcaagagagagatggtagtaatgtccggcgtcggaaagatggtatcaaagacagcctccgaacgtgtttctcggagctattaccgttgacgacggagctaggtttcttctggtttggatcttgttcttgtgatatgcatcttaaagagtttcccatttttttttggttttttggtttttcttgtaaggtgtagacacgtttgtaagtgtgtgtttatatatatgaagcatgttcgtgcttgcatgtgtattgttttgattcttgatgggtgaaaatgaagagttgagactctcacgttgtgaagctgtacttaaaatgtaaatctgtttgatcgtgatagttttgacacttctgtttttcttgagactcacgaaaatgcacatatgagaaaattggtttaaagtttggattattctattacaaactaatggaaattgattgcctacaaatggagacataagaaagagggaggaacatgggagggcactttctttgagcattttgctactttgactttcaagcgcaagctatttctttacaacgataaaacatattcatcgtatttttcttgtttatatatagatcttcgtcctttgccgcgactgcgatcgactgcgactaagtgttgttctgatcgggactattgaccaatattttaggttgctaatttttaacgatttctcgcgattggttacataatgactatacaaaacgaataatatagcaatcacaaaataaattaagatacaaaatctttagaataaacaagaaattaaattattatttttttataataagttttagaatagatataacaattatattttttattttaaaatataaattctcataaattaaaatcttcaaaacaataaagcgaccaatcacatcgattgttaaataaataacaaaacaagttgctggttgcttgtcggaatcgttggcaactagtaaacggaacatgaccctagttaaaaaccgaaatttatgtaaattttttgatatagctcttctcaattcagaatcgagttctttagatgtacctaactctcactattagtttacttctaagttggttccttgaatcttaatttgtctcttgtctcttatccaagagatagagaattcattaaaataagttatctttttgagattatttacttttttccaaaaagtgtcattttaaatgttcaatgcgaaattttagacaaaattttgtttcatattttatctattaagaagagagatgaaattatataatgtattaagaaagaatataaaataaattttaaatcatcttttttatgaaaacactgtaaaaatttataaatgcaacggaaggaatatacattattcatctactcaaggtagacgaataaagagaccaacataaaaaaaacatgtgtgaagaaataaatttgtgaccgtcatgaatcatgatcttgtgcaaaatttttacaatatatattagattaaaagataagatatgattgaaaatgatgtatactaaattagtgacatattctttcacaaaaaatttttggaatcccatattgagaaatattattaaaaaaaatgattaatacatttttcaagctttgtaataaaaaaatctaatcacgcttatcaagattctttctatatcgtcgactcttctttgtagtcacacttcaaattacattgtagtctcttattaataatttttgtagccacacttcaaattttttataatgaaaattagtgttgctagtcgttgcttttgatcgttgaaccagaaagtaagatcctctttctttaacccctcttaatctaaaaccattgctttctaacgcaagactcttttactcggataatttgtagttgactatgatggaagcaaacggtctggaaaaaccaaaggtggacgcaacaaaactcgggatggctctgcaaatagcatcaagacagatggaacaagactgagaatagctctgcagaagatgacgaagatgaattcaagcaggtcagaagtcgtaggaataagaaaaatgtgaaacccctaaggttcaagcacattgatgatactctctactacaaacaccaacacaagaacacttataatttggagatttcttagaatgcaaattgagattaattttcgacattacagattcaaaaatctttacttttttaggttgccgtcgctaatttcagtcgccagcaaaaaacaaacgaatatgatttaattattaaagaagtaaaaaaagatatttgattgaaaagtaaataaacaatgaatatcttacaagataacaaaagctacaaaacaaataatcttagtattttaaataaaatatcttacaagatttacttaaatatattgatttttatttactatttaggtatctctaactaaattaaacctagattttctttatcttcaaaatttattatcattaactatatatatattcaagaattaaatatattgaattataatattaacataaatacacctaaaattctagaaacttctttttaatatcaaatctggacaagagctatagttcataagtgtcacatggtccgaaacactccgaaccctagtaatacccacacgaacaacttgtcgagtgcgttaagatattcctttttctgatttacctttttaaccctggttaaaaagttcataggtcggtcaactaaaaaaggcaaccaagtcaaagaaaacaatttttactagttgagttcggaaataagaaaagtgaaaaccaaatcctaccttaaacagaatttaggaaaatattatatatttccttcttccacatcaccgatttataccaaaatcatataatcaaggaacctctctaaaaccctattaaatcttctctctttcgttcttcttcttcttctcctcctccatcctccaaatctcgatttcccaaaaaaaaaacctaatctcgccgtactctcctcggttccatctttctctgcggccaggttttttaattgatccgaattcagatttgttttttttttttgtgatctagggtttcggcgatttgattctgaattgctctgttttgtttttgtttgtttggtaatcagtacgtgtgcagatatggctaccgagggagttgttccttcagcgcaggatattgctgctgaatttgtgagacagtactatcatgttttaggacagcttcctcatgaagctcgtaggttatatgttgatgctagtgttgtcagcagacctgatgttactggtactatgatgtcttttacttccgttgaggtaaattcaatttgagatcataaagtcttgtcctttaatgctcctattgttttgtatatcgatctcaagctaattaggtcaaggtacttgtattagctctttagcttttttgttggttgctttagtttatatgattgacttagtcttgtttatctctgtttattgcattgtgaagctctgtagattagtgtgttcttctagtttaggtgatgatgatatgagaacagatatttgtactattgacttgttttcattttcttcaattgagattcacttttatactcttgttagttatcatcttggttcttacaggctatttacattatttatatcatcttggttcttacaggctatcaacaagcatatcctgtcctgtgactttgagaatactaaatttgaggttctgagtgttgactctcagaattctttggaagatgggatttttattatggtgatcggtttcatgactggaaaagacaaccagaggaggaagttttctcagatgttctatcttgctcgtcaaaataccctcgttgttctcaatgacatgttacgatacgttgatcaagaggattcttctaccactgaaactccatgtggtaagttgtctaactgtttttccgtttgattaagtttgagagtaaatacatatcagtttataatgagaactctctgtggacaattattgtagagccggtaactgagattgtgagaccagctgatggtctaaagaaggccgagaagactgagctgaaacagaaaaacgttgcttcggtggagaaatctgttaatgctgctgttgaaaagaatgctgctccattggacaacggaaagatgaagcaatctgaaaaagctgttattactcagaaagttacagagccagatgctgctcctcagcccgatggagccaagagatcgtttgctgacatagtgagtttttattgttgcaaatttttctttaacattggacatctatgcatatacttataagtaatacggtacaggttggatcaatggcgaaaaacgctgctccgtttcaagttaaatcccctgttcaagccccggttcagaaacctaaatacgtgggacaaccccgtgctgctgcagcacctcaaaaacctgcttacgtcagtaaatctataaagaaaaatgatcagaaggtcattgaagtaccaggttagaagacagagattgccattgaaataaatctttttcgtttcttgtctattttgttaatcagatgggtgttttggtttcaggcacttcgatatttgttgcaaatctgccattgaatgcaatgccgcctcaactctttgaactgttcaaggattttggtcctatcaaagaaaacgggattcaagtccgaagctccagggttttaatctttgacctatcatgtctttgtgctatttctttactcattacatgtcctactctcgttacacgaattccacacttttcttatgtgtccagggtaatgctaatccagtttgcttcgggtttatctcctttgaaactgttgcctcagtccagagcgtgcttcaggtaaactacaaataccagtttcttgtttcccgtttaaaagtgtttgagtttctgatattcaaactctgtcattccaggctgccaagaacacgcccttcatgcttgcagaccgtaagcttcgtgtaaaggaaaaagaaggtaagctcttctttccttaacccctcttaatctaaaaccatcggtttttagtttaaggctgaattactcggatattttgcagttgattatgatggaagcaaaccttctggtaaaaccaaaggtggaagcaacaagacgcagaatggctctgcagatagcagcaagactgagaatggctctgcagatgacagcaagacaaatggctccgcagaagatggcgagaaagaattcaaacaggttaaaagtcgtagaaataggaaaaaaagtgaagccgcacattgatactctccactacaaacaccaacagaagaacacttaaaatttggagatttcttagaattgagatgattttcgacattacagattgattcaaaaatctttacttctttaggtctgttttttttttccttttcttattatggaatatttattgtcaccagacaatttgtttcttcttcttatattccaatttttttattcgaatctttactttgcccttgcgaatacgtaaacgtatgacctggtttgttcggtttgcgagttaaagtcaatttgaagaaaaagagtaatttaagataagctaatatgaaatctgatctaatgtggcatttcaatattgtaatatcttgcttgataaagagaaaacaaataatgcgaatgcggcatctctctctcttgtctccacgtcaacgattttgctagatttgattccaatcccttttccagcttacctaccttttccctcaaaaaattgtgttaaatatggcttcatctcttaagaaatactttccattttggaagtaatttcctaatttcttagcaaggaaaaaaacctaaaaaggaaatgactataacattttataatgtaaaaggattaaaaaaaagggtagaatatcataattatcatttttacattgttaagaaacttatttatgtatccatggttacttttgtttattttttataattaaaacaaaaaaagtaattccttttaatttatcattaaattcgaaagtataaaaagcgttggaccacaatccattctgagaaaaaaccccatcctatgaaatttaactcataaaagtgtcaaaatgttcttgaaaattcaaaatttatcatgaataaaactttaaatatttctactcactattcttattttttagtatatatatctatatattatatttagaatccttcacaaaaataattgttgcataatactcattggttttacacgttttctgggctcaagttttgttccaatttttttgatatatgaaaattctaaggtctataaacatattggatgcaatgaaaaggtctaaataaacaaaatcacaatctatcttcacaacaatttcttagaaattcaaacttcacataagttgtttgaatccttttttaattaaaaggatatattttaatatgagttaactaaaataattagacacttaaaccaaattaaaagtaataaattctttacttaccaatccggtggagacacgtgagcccctatggcaataaacttataaccttcttccgccactgcctatcacaacacctattagctttgatgtgtggtggacagtggacttgtaatgatggtgagtggcctatattcattattctttttagaatcatacaagagtttttgcttaaaatgtttatcgagtcacggctattatattttttctgttactattgtattcattttattcttaaagacaaaattaaaatgactctggccctctctctcttctctctctcaaaattttcagagagagaatcaaaccaaaattttcgacgacggtaaattgatgtcgtcggtgatggttgaattgccgtccggtgtagtatccggctttcgtctgacatatattggcttccacagcagtacatggtcggcccttgtctagcatcatcggctctttcagcggtgatggctagctcacggtgttaatccggcgtagttcggttttcttttccttttggtttatatcacggttacgtttcgaccgttgattgtctttagatcagaattcattgggtatgtgtgttggtgatggcgttggttttcagtccaagcttgcttaattagatctaattccaacctatcctttgagtttaaggtttacggataataattaggcagtttgcgtttttgagatgaagattcaaagctctttcctcagcttattatgattgcctttagctgtatctcttatattcaagcttcgattgggtctaagtaacagaggtggttaatcgaagatcttttttctcttttgagattaatagatccgtattagatccttacttctgttttgtagttgttggaaaaattcagatgaagctaatcttcgagtttcattcgacttagtttcagtttccggcagaatcgatggcttcacggcgaaggatgatagatggaaaactttcgtctcctcaggttacatgtgtattcgatgctaacacgtgtctgagatatattagcttgatccaatcttcttctctaaatgtaatgttgggccagttggacttaaaatagtctctgtaaaccgttttatgttgttgggcttttgctcgttcgttgtatgttatgttcatcttaataaaatcgtcacttgtgaaaaaaataaaatgactctggcctttctagtttctacaattagactctctctactcaataatttataatctggttcaaaaggatcctctgagtgtaaaagcatgattcacgttctaacatgtagatgatttgggaataatacaacaagtgtggatcggaggatgttattagacacgcaagaggatccacacacccactaggacacgtgtttacaagtccgagctctgacatgcttcacgttcccgcgacagttcgttgtcaccgtgtaagaggaggtctctcagatctctgagctggccggggaggaccacgtaccttacccgttagccaattggtaacacttacgattataaaataaattactttgttatgataaaaataatattggttcatgcgatgaagatatatcacgttcgattaaggttacagaggaaattgaattttcaagaattgattctttttttgtttgtcaatatataatttggatatctagatttgccatggaatataaaatcattaatttgagtttggaggaggacgtcgacagaaaaaaaactaactattaataattttgagttcctccattttgagttgtcaagtaaatatgaagtcttattttataacaatcagttgaaactattactaattgaatacttggtcgattatcaatgattttaatttaatttctctcaaaatagacacattatttctattttgaaaagaatagaaccaatcatgaataacaacacactatagaacaagttataaaaatgataaatacgtattggaatgtttacgcattgtaggacctgagacaaagaaccataagcccattcctctgaacttaaaccgaaacagagcaacacgtgtctcctccgacacatgtcaccttctccgtttttaacgctgatgctaacacgtaacttgccagcgaatattataacaatttatttcataataagaaaaaactgaattctgtttttttaaatactagtagtaggagcaaagaaagaagcaataatagtggcaaaaagtaaggagacaaagaaattaaaataaaaaaatacaaagccgtacaaaaaacgtgtcgactcgagggatcatctgattgccacttggcacttttcacacattggctattctcgtcgctttcttttcttctacgtgcccaaaacccaacatttattttattcttactcaactttattttattaattttcctcaacaacataataattaattaattaatagataaacttttttatattatttttttgatataggaaagaatctaatttgattacaattccattttttggtgaatatttttaagagtaaatagaaaataataattacagggatttcgtttttaattgtacatgttaatgatgaagaactaaataaggtattgtcaagtaaatggtagtgaatattccgacttgtgctcaaatttgagttctctttctctgtctcatccatttaaacttttttttcttctgtctcccccatttgtaatcaatagtaacgaaacgtgtctcgtcaatttttgtcaatggactaaagagaaacttttttttcagttcttgtgaaaatattggattattatggatcgtggcataaaaatctgattactgtttcataagcttccagtattcttttttgttaatggcggaagcaaacgagagaagtaaagaaatggcgagaagtaatagttgtgtgtttccaagagatctgcttcagagatttatctctaactctgttgaaggtgaagatgatgatgaagaagaagatgatgatgagatcgagttaaatcttggcttatctcttggtggaagatttggtgttgataagagtaataagcttgtgagatcttcttccgttgttgtaacgatgcctctgtttcgtgaagatcatcatcatcatcaagcggcggcgatgataacaactaaggtttcgacggagacggtggcgggagcgactcggggtacgggtttgatgagaacgacgtcgttgccggcagagtcggaggaagagtggaggaagaggaaagagatgcagactttgagaagaatggcagccaagagacggagaagcgagaagcttcgtactggcgtcggcggaggaaacagtaataatccggaagaagctgctactgccaccgcttcgagacggcgaggtagaccatcgtcaggacttccacggtggtcagcgactgctaacaaaagcgggcttttgcggcagcacagtgctggtctcgattcactacaagtttccggtgaatctctaggcggaggaagagccgccggaagttcttcgagcgtctccgagttggaaactaaaggtatagtactaatctctctaatctgctcaatcattaacatgaatcttttaaatttgttgaaacttgagttaaaagtaatttgatgtaacatatcatttagattacttttgctagatagcttaatgcaaagttttcgccttttcgcaacccgaaaggtcgtttaatattgataatggatcaatgttacttaatgaacatgtaatgttttggtgaatacagcgtccagtgacgaagcaagaagcttaccatcaactacacagccacaacaagaaacaacgacaaagccaacaaatcgtttgagaagattgagttcagtggacatgaacatgaagatggagccacaagggaaaggaaaaagtgagatgccatgtgtgtttaccaaaggagatggaccaaatgggaagagagttgatgggattctttatagatacggcagtggagaagaagttaggatcatgtgtgtttgccatggcgatttcttgtctccggcggatttcgttaaacatgccggtggtcctcatgtagatcatcctcttagacacattgttgtcaacacttcttctccttctaatctcttataatagaccaaaaaccctctaaccaacccttgtttagagaagatgtttttaagagtctctggtcatttctcaatttttaagtcatatatgtattttttacctgctttatacagagagaattaaggagaaagaaacatcatttatatcagttttcaagagagtagactgagaataacattttgatgatgcatatgaaaaacctccctagcactgaaaatataaaaaacagacttgagaaagattctaatggctaggcacttgtttgctgctgtacaaatcctctaaaaacacctttcttctagctttgtatcacaatctagaaggctggattcgtttcagcagtcttacagcttgtttcattgtcggccttatcgagaggctatcgacggtgcatttgagtgccaaatgcagaacctcgaccaaatcgtctggaggaccagtctcccatagtcctgtggtgaagacttctttcgctttgccttgactcaacatcatatgagcccacgagacaatgttgaacccgttctcatgcgatgagaaagaaggatccagagctcgtttgtccgatatcagctccaagaggactatcccatagctgtaaacatctgctttctccgagactcggcatgtcattgcgtactctggagctacatatccgaatgttccagccacaccagttgtgacatgagactgcgaagttcccaagagtttcgagagtccgaaatcagatagataagcgttgtagttgttgtccaagagtatgttactcggtttgatatctctatgcaagactttaggagaacactgttcgtgaagataggagagagcacgcgctacatcaagagcaatcttgtgaagtaccttccactcaatagcagctttcgatctctctttaatgaaatcttgaaggtttcctccagataagtagttgtaaataagaaacatctcggtttcgctcgcatggtaaccgattaacataacaagattcggatgcctaaccatctcaagagcagagatctcagcatgaaactgttgatcaccttgaaacctcccaacagagagtcttttaacagcaaacacattcgttggagacacctctgctttataagtcgaaccgaaaccgccgtgaccgatacagttagagttactaaagtaaccagtagctctaacaatgatctcatacgtcagaggaataccaatgtcaacaaacactttaatctccttgatctcatctacctgaacctgagagtttcgtttccatttcctcgtgtagatgaacaagatcacaagaacaagaagcacaaagacaatcactgaagctgacacaatagaagctatctcaatcggatacaatccagatttaccaggagaatcatcatcagctgagcttggaccaatttcatcttcatcctcaaaactcataagtttcctaagaacaacattatcaacaaccctaattccaccgataaagttgttacctttaagatcaagaatctctaatttctccaacccccaaatctcctttggaatctcacctctaagatcattaaaagacagagataaaaccctaatttcagacaaatctccaacaacaggagagattacaccaccaagtcttcttttacttgaagaacaagaagacaaatctgggagatgaagaacaccactaccttcaagctcatcacagcctctgagaattaaagaaacgactctcgaatcagagttgcaagagacaccgtaccaagaacaatggtttgatgagctgtcggaaacccagctagacagaactccatttggatccaagaaactactcttcaacttcaacagagcagcttcgtcgtggagaccaccaccactctcggttaaaagtttccgagaaaacgaaaacataaacagattaaacagcaagaagaccaaacccagaagtttcatttttcttctttttcttcacaagagaaagagaaagagacgacggcaaaatgaacaaagaaaatcaacaaaaccctaaaataaatctcttttttcacaaatttttttgatctctccctctctctctctcttccttcgctctcgaaatcgaaaattttcaagttgcaaaagaagaaagtttctttactcaaaaagaaaatgacattaaacaaacaattttttttctatggctctattatcaagacacataataaatttaaaaaaagttcttaaacgtattggaaacagtcaaagaagaatgaatttcgaggaaaagaggaaaaaaagaaagaaaaaaatctctcagcttttctaacttttcttctttttttttctccgtccttaaattattgaaatttcaaaacatgctagtgaaaaaattacttagatattatccattagaattatataaaaaattattttaactttttcttatttatttctaaaattgtcgcttgtatttgtgagagataaataggatagtgtttcactttcagcggtgtctctctcgggttctgtcgttaaaattttgtcgttgtcagagagactttatagaagagtgggacccagtgaagtcaatgtctgaatgtattaatgtaagagagagagagaagtgaaagaccacatggctgcttctggtttgaccaggcgggataggtcgtgggacctgcactagtctctttattggtccatgattagattccaaaatcgtttctttcataacgattcatttttatttaagttagacgtgtattcctctgtgtatcatcgtcattatgacgttacattttgcgtcagaaatacatatatggtccaaatgtttttgttctttttgtttatatcacacgactcctttatgtccatattttagaattgtaaccgttgatgcctttaaccaaattgagtactagaagaagaaactagctaaagtacgatttcgctttacaaagaaaaggaatcacagttgtacttgtgcagatcttatatcaagaaaaagaatcttgtaatgtgttcaatatctttctttttttcaccaatgtgttcaatatcttatcatatgttttgcacataataaataaaaatgttaacatatgcaatgggtaagaacatctaacaaattttgggacattttgtacagtaattataacaaaaatgaaaaaaataacatctaacaaaaagtggatctagaatttttttagctgaaaataaatgatcttttcattaatgagatgtaaacaagtgtaataatttactaaagataacaaaatattagacaagaaacgtgattttgtattgacgtacagtacagtacgtttatctggaagcacgaatgaatagaaaataaaacgttacaaaaatacagtttattgtgaaaagttgtaatatataacaaaaacataacttatttttattgtttaaaagtgtttattcttaaaaaattaacatgtgaaaaatgtataataaagactcacacatctcattgattattttctgttaatctgctaatttatataccactttaattgtaaattaatatattgtcaaatatcttgaaatatagtaatgatgccgttctttagaattccgatcattttgaaacacttgacaaaaacatggacctttaggagtagtagaaagaaatatagtttgcaatattaataagaaaatgtgtgatttagtaaaaataaatgatttgtgttaatgccgttgaaagatttaattataagtttataacctatgatgaaactcactaatttcatgttattgtcaataaaataattatatgtacaaagttccaaaacaaggagttatataaagatacatagctcattttacacatatataaaatctagttattaattccttctaaatgacaaggcaaaaaaaatgataagtgtcaatattttttatttttctattgaatttgtaaatatatagattaataccgtaataatagaaatcagatctatagggaaaactgttaaaacagtaatgagatgggaagaattacacacattttcacgttttgccgacaatttagtgttaatacttcttacatatattttgtttatattagccaacaaagtcaaattgattattcctttctccttttgacaaatcaagttgattacttctagctaaatcttttttttacttgagaagttaaaacacttacatatctaagatgtcgacgtgcattcaaatatacatcaacctcaatggatgatctatgttgtttttacacatatttaccacaagataaatgactatgcatgtgacctttaatctttattaaaccttttgtttccgataattaaagtgtagcaactcctttctccttttgacatatcaagttgataactaataatagcttatataaaattttacttgataaaataaaacacttctatctaaactctcgacggccaatgaaagaaatataaaatcaatgggtaaatctatgttgaattttgtttgatattcatctaccataagatttgtgaatattgtgacttcagacctaatctttatttaaaccttataatgctaatactattttcaaacttcacctgacttgatgatgataacagaaaaactatattgttttttttttttttttttttgggtaactgctctcaataggcaagaaacttttacatttgtaaaatctatttttttttacctttagctaaagattaaaacagagttgcgtaagaatctaatctaaagttaagaagaagagcaacaaggaaatcaacaaaaccattgatgagatgttttaaactctgctttttgcagtctctgttcgtcattccctctagtcatctcatcatctactaccttctttgaagaactgtagcaacacaaagaaaactcgggtaggcttttcgattgaaacaatcacagattaaagaagaccaatgtgagaatccggaagtagcgatctacctggaacagcaacagcaactccaacagctccaatggcagcagaagagccagccacaagaagaattgtaatcacaacttggccatctgcaccaggagaagcacgggcaacattttaaccgtttgcagcaaaagaagttgtaaccacaacttggcaatctgcagcaggagaaacaaggtccagtgttcttgcaacacaaccaagaacatcgcttcttctgcttctgctgttgctgctgctgtgtcatcttcttctttgttgctttctttttcttcttcttctttttcgttcttcatgaaaagaacaattaatcaaaaataaagtttttgaagactactacaatgagatgatggtataaagtaacgaagctcacattggatatgaaaatgactgtgtgctgcttggtgtttcgtctgagttattgcaatctccgatgttcctccacgatacatttgagttcgatgacttatcctcacattcgccactcgctttgtcctccatatcaaagctctttcctagatcagaagaatcagccggaccatgaatagcagggcagaacgataacagctctcccgattttgtaatctctccagacttgaaatcacggtaactaaacaactcatctcttgctatcgtgttatcacctatgctgagactaaacagagaatcatttgaaagtgtgctcaaattcttctccaaggtaggtaacgagtttctctcaggttgatcagatccttctctatccatcatttgaatcgaaggagataaaagcaaaggctccactgaagcattcgttacaccagacacttgtgaccctggtgtgtctgatgaaccttgtaactcgaataatttagaagacaggctaaagagctccttattgtgtaggctactatcgaaagataagtttgatttccttccttttgcattgatctcgtgtatatcctctgaagaggttggagacaaggaaagagatgtggatcttctggtggtgatctctggatcttcctcgagacgaacatcactgaccccataactagcaatgctccccaattggaacaaaaccggcttctcatcattcacttctttgatcgttggtcttggctcaaaactcttattattatctgattttctatgcttctttagatgataagcctttctattttttcctttcttgtgattcgtttccatagctaaaagaaacaatgaaaacttacataagctacatcgtagagtgattcaacgaaccaatcagatgtaaagcagcataaagaaaaatgatatagtaaaacagaggacttacttatacctatgaatatccatgtaaagttccaatgaaccttagctcttcgaaccttatactttacccgcaatggccccctctgttagtaatcttctcttcacgattcttctctgtctataaaccaaaatgaaacttaatacaattttgagaaatgaaaccaaatgaacaaacaacagaaatataatgatgaactcatgaaggtttaataaataaaggcaacgaacctccgatataggaaactgtaaaatctatccttgatattagattgaagcaatgagcaattcataaaacaaacacacgaaaagggcaaatcctttcaaaagtttgaagaaaattgaaagaaataattcatttggtctttcttttttgttttgcctgaagatttctataaaccaaaggcattcctacaatttagggattgactagtcttaaatctatattggctgcttttggcgccatctttttttaactaaaaactctcctatctgacgctttctattaatagcaatgccaagtgtcacaacaccaaaaagagacgacaatacatcaatgatagagatgtctttggcttgtgtcctgaaagcttgtatcatgtgttgagaccagcccagttcttgaaggcaacaagagattccattttcttgtagttcctcttcctcagctttggcaatctgagtttcttgtgagtctccatgaacgcttgcttatacctccacttatccacaaatatcttcatctcctgagatttctctaccacttgcatcgctgcatcaaagaatcctcctttcaccaatgcgtacaagaatgcatcgactagagcatgatctagtctggacctcttctctgcctccaccgacgatatcttacctttaatctcgttccacaagagcaggacgttaaagtacttttccccgctcacatatccattaatcaaagataagtatgtctggttgtttggctcataacgtaggaaaaccatccttctgaatgtcctccgtgcatcttccagacgcccggatttacaaaaggcatgaataatcgaattccaatcatgggaattc

SEQ ID NO: 128 - DNA, 84723 bp, Arabidopsis thaliana
aagctttagccctttgaacactcccttttttttcttagttatataggtaacccacttatgatcacagttaattccatgtagatcgtattaaagtagtctattgactaaatcactaaaatatcaattaatgaattaatgttgtatgatttgttatcgtttatacgaaagtaaagaaaaacaagaaaacatgacttggattaagtaactctatgttctgtcttaatacaggagagcagggaattcaagacgaccaccaggaagagcataagtacggttaaagcttgggtaagaagcagaaagagagagagaagtataattgttggcaaattaatataggtcttgtattgctgctagattctcttttcctttcatttgggatcgaatcttttaaatatgcgcaaaatatttgtgaccctacaattctgttttttttttttttaaatgtttgttttgttcctatagtgaagaaatattgagctagttaggggaggttttaaaaaaatgaagacactgattattaaaaggatttcaagaaagaaaagaagtatacgtacatgcaatgcaatcctgttttctcacgcattgcacgacttatattgggattatttctaatttgatccatcatcaaataacgtttagatgctttatttccttactcacattgtttattgggtacttgcactaaatgatcattaacatttattaagttaggtaaataattgtgtactccttttatgtgcaaaaacacaaaatgggtactattttattactaacatgctttcttatcaaatagcagtaccctatgttgttctaaataacatgctaattcaattcagatttggcagacaaaataacatggtattttagagagagcgcgcacaagtgtgtttttttaaaacaaatgaaaacatcataattacgtacctgattgacccttgtgtatatattcacgattagaaattgtagattaccaaaacactcgcacaaaatggttctatatatagacaatatatgattcttatcacatgttttgaatgaaaaaaaaagaattaagatggattttttttttgtaaagaacaattgtactttgaaagagtcttatccaatcattaaaaaaaatgtcgaatccattatttattgatgtattctgaaagcatatattcttccaaaggggcaaataaaagagatgtcgacaaagattggatacataagatattaataatttataaatgcaatggcatatatatatgatataatttgagctctaaatgccgaaatttgaaaaggagaatgtgtgtaatggttcttacaaataaaggagaccacaatgcttctttgtgttatgcttttttcccatcttttattcttttgttcttttgtggggttaactctaccactactcattttctcgctcttttttcacttattttccatatatttctaatttctaaattaattttactaatcttgaaatacaaaaaactattagacttagcttactaatttactacaccaccaacatacacactacgcaacatatgctaatatgtattaaaatgaaaagaacaaaaaatgagaaccggtattacaatttatcgtagtgtatgactagttatgagatgagaaggttcttgaaaaaagaattactaaccaaataatgtagattaattatttgcaaataaagaaaagcaagaatatatagcaaaatcatgagtttacggttcggctctataaaatcttctacaaccatccacgataaacttgatacatgaaatgtcttcttccattaaaacatgagttccacatataaaatggtttacaagtaactctcgaacatatgtgcatggtaaagcaaatatataataccattattttttctgtcttaattaagcaaaattaaacatatatataatatatgatccctacatgttcacttttaaagttcacaatttcaagagtttgaatatctttaatttgaattattaccaaacgcattagacagactaaacagagacataataatcaatcaacttctttttgtcttttttttttttttttttttgggcttccagtcttcataatcaaaagtaactgaagaccagtcttaaagctggaacatttgaactaaacatatacgactgctcctatcgctctagaaattttaattaacaattattcatagttacttaattacaaagacaacaataaaggtgaacgaataaattaaaggaaaattatgaaaatagtttaatttgtatgaaacttttcatccgcataccaaatgtcatatactcttatcttacatttttctcttgggacatatttttggagcgaacactttcgcatgtacgataaggttcagtggtctgagcttcgactacgttaaaatgatgattagggtttactaatttggaattaggagttacatttaaggttaaaagtttatgagtttcaagtttcaacgaagctttaaagtttaaacgatggttaaagttttatgattatggtgggctatgttatagttctttcaatttcgttgggccaaatgggctaaacgattaacgaccctatgaatgggcctgaaaaaatgaaagccacgtgtcagacccccacaatggactttgactcggtgcggctgccggagagaataattaattatcaactccgatgaaaagaaaacaaatacaaagttccaacaaaaatcgaaattcacaatttctcttcttctaaatccatggagtgatgatgatgatagatagattgaatccaaacacaaaccggatccgagattaaaaacaatccggattgtttatatttactttagatcggagaaagatgccgccggcgaccggagatatcgatcgtcagatcgagcagcttatggagtgtaaagcgttatctgaaacggaggtgaagatgttgtgtgagcacgcaaagacgattcttgtggaagagtataatgttcaaccggttaaatgtccggttaccgtctgcggtgatatccacggccaattttacgatctaatcgagctttttcgtatcggtggttcttctcctgatactaattatcttttcatgggtgattatgttggtgagagtctctctttaccttatagctttttttagggtttctacatttctcacatctcttgatttggatttgggtattttccctaatttggatttgattttgttgaccttttggggctaatgtagacttatttggaagtgtttactagaaatggatagattattgtttatctatcgaaaagttttggttttggaagattttgtcattgaaaagacgaaacttttgttttagctgttaactattctcagggcttctacaatggagtagcttgaccttgggagatataacattttaatgtagtttgtgaagcttcatgttcgagtactcggatttgtgtttctcttttctctgtttaagtgccttaagctccgtttcctacttaagttgctcaattagctaactaatggatcattgttaaacttgtgaagatcgagggtattattctgtggagacagtctcacttttggtagcactgaaagttcgttacagagatagacttactatcctaagagggaatcatgaaagccgtcaaattactcaagtgtaagttgttttctctactaagttttgtattataagcttctcagcctctctcaaaatgtttcttgctgattgcttacctttttcaggtatgggttttatgatgaatgtttgaggaaatatggaaatgctaatgtatggaagcacttcactgatctttttgattatcttccacttacagctcttattgagagtcaggtatttaaaaaactaatgagcgttttcactaccttagacaatctcttctctgtttctgctgttttggacttgactacagaactctttttttctgtaggttttctgtttacatggaggactttcaccttctttagatacacttgacaacatccgatctttagatcgaattcaagaggttagttccagaatccaaaccaacaaaaggatgcaccttacttgatgtttacataacgagactaagatgtttgtgttgcctctaggttccacatgaaggaccaatgtgtgatctcttatggtctgatccagatgaccgatgcggttggggaatatctcctcgtggtgcaggctacactttcggacaagatatcgctactcagtttaaccacaccaatggactctctctgatttcaagagcacatcaacttgtcatggaaggttttaattggtgccaagaaaagaacgttgtgactgtatttagtgccccaaactattgctaccgttgtggcaacatggctgcgattctagagatcggtgagaacatggaccagaatttccttcagtttgatccagctccacgtcaagtcgaacccgaaaccactcgcaagactccagattattttttgtaagtaccaaaagaactaaagctgcaattccacacactagctcttcgtctcttttgcttctattcttaaccactttttgtaatttcatattccttacgtctatttctgtttgttaaactctccattgtcttttaaaatccgtaattttttgtgtgcaaagattctggtccaagtaactgaaaccgctatcaccaaattctattgaagccaactttgtacagagaaatgatgatcatgttacacagcaaaagccctagctaggtagatataaatatgaatgttgtggagaggtacagacaataaacaaacaagctggagctgagatctaatctatagaaaaacaacactcagatcaaaataagatgaatcgagagtttcaagagctttctagttcgctttggatccaatcttgtgcacacatcaaggcttgcacggtactcggtctaagcgaacgccatgtttcactaacccgtctcctttgacaagtttcaaaggcgtcttcttctgatgatacattcaacattggaactgctaacacgttacgtgccatcatggagagaattgggtacttaggtgtgtgaactttccaccagttcaggatgtcgaaatctgaattccggggaaaaagtggctcttctagatacttttctagatctgatttagagtcttgacccggtgtagtagttgtttcgttaatgtacctatcgaattctgtgagtctatcgtcaggctctttcccatgggcaacaccgtttgaccgatgatgatgattctgccagtcaagagcttgatttgacgacgctaatagcgatcctacagaatgctcatcgtacagcagtttgatgcactcagaaatatcttcaatgagctctgaagcactagtaccataaaacagagggtaatagtattcaaccagcttcattttgaaccgcgggtctaatatggtagcgatggctagaaccaggtagtttttatcccagaaatcgtcaaatttctttctcatgtttacaactagagagctaatgaaatcatccgggttcttgctccactcaattaaccggaggtgtatgtcgcatacctctgggaagtacatattggcgggtaaacaactgctctttgtgaatgcatttatcacttcaacaaagactttcaagaactcaacaattgttcctaatctctcccattccaaatcagatggacataacacggaatcaggatcatgttcattcatgagcgaaaacgcgctcttttgctctaaagcattctccagcatggtgcatgttgagtcccatctcattgggtcatcgatgcataggttcctttcacttacagctcccgtttcaactatccactggttgaatctatcttgaatagattctgagcttttaacatatctaatactctctcgaataatgtttattgtgtcacaacaagcttccagggaatcttgaaccatctcgttaatgacattaactccacagctcacatcaaacaattggccgtaacagtaaaggaacttattctgcgataaccggtctctgattttactagctacgttctcactaaacggaggagcatgactcgacgccatagaaaacaacttccggtcaatatcccactccatcaaacacgtcattataacttcagcaagcatctcaccactatgagatggatcaaccataaagaagttcaaaactctctttttcaattcccatccttcatcaatataatgcgctgccaaacacaagaattcatcagaatcacccgaaccactccacacatcaacactaatactaatcttcccaggtaacttatccaacgcttcgaaaatcttatgcttctctttcgcataaatctccatacaatcagattcaactctttcaaaagcaacaagctcaaacaaaggctgtaaatttccaataaacattctgaatccaacatcttcaaccatactcaacggataaccatgtaagataatcatcctggctaaatcgaatcgacaccgcctctgatccaaacccatactcacaacattaacatcttcatgttcttctttctcatgttcatatctaacattcactacactaagcacttcttcatcctttatccgctcattagctaactctttcttcttccccttaacgaaatactgagcaacaccgttgttgttaccattagttctcctcctacatctaatcaaatggttcctcaaatgcgaagtcccgctcgcgcttgagccgctaagtcgcttcttacaatgcctgcagattgcaatgtatgtctcaccttttctaactctatcgaaatcattccacactactgatttcaatctaccagattttacaatcactgcatctgacaaatccatctcattgtttatcatcagtttcttctgtctcctacacatgtaaacaaatagcagaattttcaccagataattcgaattcaaacaacgaaaccaagttacacaaaacctaaaatctcatagtttccatttgcataaagcttttaagaaaccatcgaattgtcaagaaaaaaggttagaatctgagctctaaagcacatgtacctcttcattcaagtcgcagcggtaagcttctcactggtggtttaacggcggcgaagtctctcagtgtcggtggtcgcggcggtagggttttaagaagaggaagaaaaaaaagctgaaagcttttctgttagcgagagatatttttttgaaacggcgaacaaaaagtaaatttacgaaatgagaccttggattcatgtaactttagaaatatagcccaaagttagtttatcatcaaaattgtccttttttttaaatctaatattaaattatattcaaagaaaaataaacttttatacatgtaaatgcaaaagacttttcttaaaaattaaaagagatattatcgatggtgttatcttgtcaaagcaaaccacgtttggatcccgcctttgtatttctcacaactccctctccttgttgtccttaactggtttctaatgtttttgtctatcaaattgtactttttcgattgcttatgttcatataaacacacttctctccacgtcgcaaggtttgagcctgaacgtctgcgatatgttgttcatcttgtcgaacatagagccgctttggaagctcgcagtcactgctttgaaacccctctccgcgttgtttaagtaactagagttgtatgactcagctgcttttgaattgtggagccgatattgaggctcagaatgaagttggacatacttctctaagaattgctcttcaaaaatgaaaatctcgatctttcaagtaaatttgtttatcttttaaactttgttgtgagtctttgtaaatgaaaaataacatgtttatgtcctcttgattgcagcttcttcttgaaagaggtgtcaatctgaatgcttttaatttttatttgcataaagcttttaagaaaccatctttataaatatagcccaaaggtatgttattatcaaaatggtgttggtgaacatgttgatgttgttacctcctcggatgtgtctctcgacatggatttaatcaaattttttttttaaattgtttttttaataaacttatggtacataaattaacagttgtatagtcttatcaaaatcacaaaaaaaaaaacgatgtagtaaaaatattaatagtaaaatctatcaagaattaataaaatattttgaaaacatacaaaattccaagagaaattatagcgggttgcaaaaatggatcaccacaaacaataatagcaaacgagaacaaaactcaaaacaatttaggtctctgaaacagtatatatactcatggccatctttccatcaaatcatccagaaaaaaaaaacgaaaaaaaacaaaaaaaaataataaaacaaaaaaaactttttatttttaaataaaaataaaataaaaaatgggatacacaaatgtgtccattttattaggcctgttgatggtctttgttacaccgatggtgttcgcagatgatgtgacaccaatcccagagggcaaaccccaagtggcgcagtggttcaatgccaacgttggtccattggctcaacgtaaaggcttagatcctgctcttgtagctgctgaggctgctccacgtatcatcaacgtactattcacacttattgtcttaaactcatcctttgtaccaatagattttgatacaatttttttgaaaaacatgtaaaaattattgcaggtgaatccaaagggtggtgaattcaaaacactaacggacgcaataaagagcgttcctgcagggaacacaaagcgggtgatcataaagatggctcctggtgaatacaaagagaaggtcactatcgacaggaacaaacccttcattacattgatgggacaacccaatgccatgcctgttatcacctatgacggtaccgccgccaagtatggaaccgttgatagcgcctctctcattatcttatccgactatttcatggccgttaacatcgtcgttaaggtaagtgatcctactatatatcatacatctatgtgactagtcgactatttcatggccgagtgatttatttttttgcatatgtagaacactgcgccggcaccagatggtaaaactaagggagcacaagctttatccatgagaatctccggaaattttgctgctttctacaactgcaaattctacggtttccaagacacaatctgtgacgatacaggaaaccatttcttcaaggattgttacgttgaaggaacattcgatttcatcttcggaagtggaacctctatgtacttggtacgtaacatctcatacttatttcttaatacataaagtgcgagatctctaatgcatgtttgagttcaaaagggaacacaattgcacgtggttggagacggtattagagtgatagcagcgcatgcaggaaagagcgcagaagagaagagtggatactctttcgtgcactgcaaggtgactggaaccggtggaggaatttatttgggaagagcatggatgagccaccctaaggttgtttatgcctacaccgagatgaccagcgttgtcaaccccaccggatggcaagaaaacaagactcccgcacatgacaagtaagtcccacttttcacattacataaaaaatcgtatgaatatcacccaatcggtccatgtcctttatgctgattatatcaaaaatgacagaaccgtgttctacggagagtacaagtgttcaggaccaggatcacacaaagccaagagagtaccattcacacaagacattgacgacaaagaagctaaccgtttcctatccctcggctacatccaaggatccaagtggcttctcccaccacccgctttgtaaactcttcaatatcaagtctaaaatcatattttgcacatatatcacttttaacaaaaaaattatttttacatatatcacttttagcaaactttttctttacctagtcgtcactacttacgaccctatgtatgcttttatgcaaagaaccgagaggtcgataatctgagaaacatataagcaatcgagacttagccgaaataaattgattttctctctcaaataaaagtataaatggtaccctatatttatgtagcttttctaaaatagccgaggttttatttaattatcaaaaaagtcttttaagtctaaaagtaaaactcggtcacgaccaaagtaaaaactacgaaacagtaccttttgtttatgtatacttacaaaagtatcccaaatgtatttaattatcaaaaaggtccgttttaattacaatcactgaataatcatctggtgttactctctctgctcacaaatggccgcagctacaacaaccttatcatcatcttcatcatcaccatcgctaactctcatcaatgcctcacacagatttgtctctgtaactcccttctcttctaactctatattcctccgccgccgattccgccgcctaaatcgctcactcgcttcgtctagctcccacgtacgttctgattatctcctactcatagaattgtgtaatccgaatccgaatccgaatttactcaatctctttatccttagtcgcgtaggcgatacgaatcagacgatagattcttcggcggtggtgacaattacgatgttgttcccgatgacgacggatttagcgacgatgatgatgaagaagacgaaagagaaagcagtgtcgatcttttgatcagattcttgagaagcatgttcaagaaagtctcgaaacgaactaaaaaagcatcgcgacggattttgccagctgccatgtctcctcgactcgtgagtctcttcttcttctccattaaagcttttaagtgtttcttcagttttgtgggaaattttgtttctttatcctcaagtttccacttttgatgtttcctctgtttttatgatttgcaggtgtcttttgcagtagatgggatattgttattaggttcactttccattacaagagcatttcttgaggtaatcttttaccattttgcttacttaattgaatcactagtatcgaatcgtatatggtttgattctgttttgtgtgattggtttttgagctttcttgttgaagctagtttgatctgatagttgcattggattgtatgtgtagcatacactatttatgagcgtttatgaattagagtaacttgttttagttgagtgtgatctcatggatatgtgttgctaacttttatggaaggtaatatgcaatctaggaggaactgtgtttacggtgattctgctgatacggttgttctgggcggcagcttcgttcttccagacttatgggaactcttttggaccaaacccggtaaattaaaaccttgttttactcccatttgggtgtgagatgttgtaactcatgtcttgttacgtcaattggtaaagggaaatgtaagataaatgtgtgcattaatatagctagggaattatgtagtttatcaagagttagaagacgaaactaagaagataaaagaatgtttcctgtaatgtttcctgatatttgttgttcaacgtatgtgtaattttaatgaatacaccattgtgttgttattactataacatgatgcaaaaaagctttagaagagttgaaatcgaaggtgttaggctggagggaacaaaacaagctggacacagagttagtgtatttgtcattcatgatcatgtcgagaatacaatgtggttttaggagtgatttgtattatttaaaaccttttaatatagatcgatcctttgtttattttcagagttcaaaattttactctgaatttaatcaaagagaatgtattatatttgaatatagacaaatcataaattcaatgatgctaaatcataaattaggtttatgtggacacatcatcttcttctttttttggatcaaagggtgacatatcttttggtaagacgtaaatacttaatgtgtctttcttgatgatgttaatttctgtaaaacctcgtaccgtacacattgatgaaaatagtgagatcttgaaaatagagaggtcgaaaccaccacactacactagaccgtcttggagttactatagctacatctttgactttcattgttctttgcacgcaacttatccaaatcaacacatgttatcaggaaacgcggattctgtatttctcatgtgttacaaaagcgaaaagaatatatattttgaaaagttcatattataccaatttgacatcaaacaatttaataaatttgtgaataatttaagaatattcaatatattatgctgctgcagttgaaacctatacacaatatgaatttttaaagggggaaataaaagacaatctttaaagttgtaactcttaattagttgagcaatttttttttatccgggtatgattttgggatatccctatatatcggtttgtttgaatttgaaattatttttctttgtttaaacatggataaactgtaattacgatatattttttttgttttttcttaaactacaactaagatctatttggttttaatgttttataaattgagtctttgttttctttctagaaaaaagttatgaatcagtcgtagttaaaagaaaaatgtatagacaaacacacaaaaactataagatgaagaaatttcaaagatgtttactttccggaaaatttgacgctacaaaaagtgagaaagaaggtgagtcgtcgtcactctgagttggtagcaaagacgcggaagtttggaagtatctagggtttattaagtcatacataaagtaaatcataaataaagttaactcgtaattgagattttgtttaattactttttccacaactctcggtaaactgtattgttctcttctaataagtcttgggaatcagagccagattgttttttttccataatataatagtataatctctgtggaaactataaaaagtagcagtacaccatagactatgaaatttcaaattcattcatcctgttaagggctcaactagttaagtaataataattacactccaaatctgtaagtactaaattttgtaacaactcctaaattacacatacgattttatgtatggattacacatctattaatacgaaccatgaaaacatttcacaagaaagttttgattttaatttatatatcaaattggtatacgatgtatatcgtattttgttgttgtttgtttacgtcatgtatatctcatacttaccaaattaaatattgtttcggtcaatcataatggaaagtgtaaaaactattatttgaatctgaagatattcttatttcaaatatttgtcgtttttgctcgacgacgaactgacgtacatgttttgatcttacagaaaagaaaatggcgaccatcgaaattccgaaaagattccctaggttacggtccaaactcaagttaggacgtggaacatttgagatttgtaatgatttaccggccttgactgttaatagatatacatagacattgaaagggataacatgaacttctgacttaatttcacaataagttaaaccatgactgacattttggtgcttataatagtcaactcaaagacatatccatagatatgatacatttaacctgttagtcaagatttacaattgaaatagaattatttgtaagtttttaggaatgtacttatatattgatattgtcaaatgttaaagtatgtgcaaatatatcttgacccagtcgtaattataattaatgaaacacgaaccgggtacgtttgtgtgtgtgtgtatccaatatcacaatgtatagaccatataaactaaaattattgcatatcatagacttcgctctcacatcggatagagactgtttataaggtatctaatacaattaagaaggcaaaatcgctaaatacacaacaatttgtggtgaaatatataataaaatattttacataattttggtggcaagaaaataaataactgatccgttagttatgatattatccatgaagggttttgaatatattttatgtggtgaggttgaagtatgaaaccccataaaaaataggggagattgaagatagaaggtaatggctgaacctcattataaagtgttgattggaatttggaacacaacttagaacatacagtatatagttattgctgatatattccacacgtcttggttttggaagatatatgaagtctagactacaatatgatttttggaaaatttaaaattttatagaacatgaagtcaaaatagactatgattttttcaactacataagcaagagaacaaaaaaaaggagggatttaaattccaactcatgtctagagaaaaaaaaatcaactacttggtaccattgtgtcccactatttactattttagcaacggtacagatcaggcaatcaggacacactttcctggactctcttgtagtcttgtccctttgaatctcctaccgacccccaaaaaaaaaaaaaagtcttatttaattatttaataatcatttattttgtgtatatgtttattattattagcatatgcatcccgaatttgaccgtcatgcatgccgtaatctaagaaaaggataatcaaatttgagcacgttcatttcgaatatatatatagacgccaaacatagagactaaacctcatcaaaccacagctgttcaattcctatcccacacaaaaaaaaaaaaaacacgcacacaaaaacaagagctgtgagtttgatcaatctcttcaaaaagtgtaacacatgggtctaatgaatcggtcaaagaatgatgagtacgtaaagctactaggagcatggcctagcccttttgtgctgagaactcggatcgcacttaacctaaagaacgtagcatacgagtatctagaagaagaagatactttgagttcggagagcgttttaaactataaccccgtccataaacagatccctatcctcattcatggcaacaaaccaatccgtgaatctctcaacatcgtcatgtatgttgatgagacttggctctccggtcctcccatccttccctctgatccatttgatcgcgctgtggctcgattttgggacgtctatatcgatgaacacgtaagtcatgcatccacggagaaactttcttttatatatgtttatatttttcatgtttaatttgttttagcacacccgtttttaacaatgattttaagatggaatgataagagctttcattcaaaaaaaaaaaatgaaaatgaaaactttaacatgtaatttattaatgtctttccaactgtttagtagaattttgtaccttccatgaatcataaattaattatttatatctttcttgatctttcatatagtgtttcacatcaatcaatggagtggcagtagcaaaaggtgaggagaacataaatgcggcgatagctaagctagagcagtgtatggctctattggaagaaacgtttcaagaatgcagcaaaggaagaggcttctttggaggagaaaacatcgggttcatcgacattggtttcggctcgatgttgggtcctcttacggttcttgagaaatttaccggcgtcaagttcatacatcctgaaaacacaccaggtcttttccattgggctgacagattctacgcccatgaagcggtcaagcctgtcatgcccgatatcgaaaaactggtccagttcgctaggctcaagttcaatacttcaatctttaaatgaaaaccaaggacttataaatatatatacgacgactaaattaacataatcgagttcatggaattaataagatgtaaactcgtttagttaaaaggcgtagtcaaaaagttctttcgtttgtttgttttttcttcttcctacatttcatatgtatgcagagataaccaatcgtgccacgtaaaaacgtgtctcttcttcttcggtaaatttaaattaacttttcattatgctataaaagaaatacttttgttgacagaaaagtatgagcaaatgtcaatattttataactatcacgtgaaatccattaattgggcgaagcttcacacacgtttcacaattggagggaaaacgacggaactcaacatgactcataattaaacatagctagtggtgtgatcacatgataaagacaatgtaatgatgtattataggaccattggtattattattggtcaattctaattcgcctactagtaaacagactagaatacctgaaatgaaatgcattaaaaaaatttgggtctactagaaatataaagataaaaaccagatatacacaaattaaacgtttcgtataacaatttatacaaacgtataccaattttcttccaataaacacgacaaaattgtacatcaacaaaactcagagacagaaatttcataggaaaaaaaagtatacactacagatttatattatcctagtattaaattatctatttacgtatgtgcgcaagactggctctggtcaaattattttaacttgcagtcgcaaaaaaaataaaataataaccacttaaaaggcaagaatgatagtatggggttatttcttttaagtggtagctccgcctgatcaccaatacaataaataagtttatccatatgattattatttttacatttttgaccatgtaaataaaagttctagctccgccagtatgatatatcgatctcaaagttccaaatatgccattatttgaaccacataacttaaatttatcaagttaaaaatttagggttacaatgtaattagcggataaaaaacaagtatcaaatcagtttcactttctttcaataaagataagacatggactgacgaaattttaaaattatttgagaatgacttaatgaaaccgttacttgatctgtttatgcaaacttaacgaaccagtttggtaagtgaagataaaacgatgcatatatatgaatatatataatcagaattccttcttctttacggcgttgtaaattgtatttccgtgtatatataatatgctcatccaaatgttaaatgccaaaacaaaaatgaaataaaaaattagagactttttatataaaaatgtcatcagactaattttaagttcatactcttaaacactaaacgttagttactagaagttagcaactttttttttcgggatataatagtctattattttgtttcctttctctttttttttttcttttttggtgcaaattttatttttggtcatttggtcgcattattgaatgaaatatggatttatgttcaaaagtggcgacttacagtctcacatatctccaaaaaatatagtggtgattagagatatacatgtcattgctggaaatataatttaattaaaggttggaagattctgtttactgtctagtgaatgataaccaaaaccgcacccaaaatcgcatcgcaacagtgttgtaacagtatcaaaatctttacatatacatatgtatttacgtgttttcgttactatttgaaccgcaccgcacttgtcccgcactccttgaaaacgtcataacctaggatcgtgcgtgataaaaataatagagtagaaacgtcgaattcaccaaaattcttggttctcttaatttttctaaaataatactatctaaccatagtacagtcaacattcaatcctgacacacttctcaggatacattgccggtcgtatgagcccatcttattttcaaacaagtcctctttaaatattagtaatttagtactttcgaaaataaaataaaatatgttgtggtttttagtcaaactcagatcctttgaagttttattaaaaacagccgccaaaatggcatggcagctcgagaaagtgaaagagaaagaagtaaacgataatcaaattgttcctttataaatagtcacccaaactcaatcaaattaacagaaacaaacacaaactcttcagtccagatgttaaaaaacaagaaatcagacaactccttgtctcgagacacattacaaatcaaaaaaagaaaaaaaaccacgatggctcaaaatggttcgaatactactgtgaagctgatagggacatgggcaagcccattcgctataagggctcaagtggctctacacctcaagtcagtagagcacgagtatgtcgaagaaaccgatgttctgaaaggaaagagcgatcttcttattaaatccaaccctatacacaagaaagtccctgtcctcatccatggtgatgtatcaatctgtgaatctctcaacatcgtccaatacgtcgatgaatcttggccgtctgatctttccatcctcccaacacttccctcggaacgtgcctttgcccgtttttgggctcacttcgttgacggaaaggtaacaaaaaacttagatatattatttttaattagtgaatttgtttttagcaatgttgaattttggtcaatgaagaatcctgaaatcagaaccgaaacaattatgttaatatctgttaagttttaacttttaagggataattatcgaaaatgatggaactatgaaatatcccttcaacgaaaaagaaagaaaaaaaagattagtgtaattatgtcaattttaagagattgatacttttttacatagtgagtagtttgattaacgttggtctacttcagccaaaacttatttttctaaaaagtggttgatgagaattaataagcataatttttttttttataacaaaatagtctaatatattaatgacgattgtaacagttgtttgaatcgatcgatgcggtggcgggagcaaaagacgacgccgccaggatgacattggcggggaatctgatggagaatctagcggcacttgaagaggcgtttcaaaagagtagcaaaggcggggacttttttggaggggggaacattgggtttgtcgatataactgttggggccatagtaggtccaatctctgtcattgaagctttttcaggtgttaagtttttgcgtccagacacaacaccgggcctgattcagtgggctgagaaatttagggcccatgaagctgtaaaaccttacatgcctaccgttgccgagttcatcgagtttgccaaaaagaaattcagtgtttagtgactacatctcttatgattttcttcaaaagaaatcttatttatgtaccgataaatgtgtggaaatctaatttatgcttttttgctttcttaaaattgatgtatgtgaggtgttagaaacgtaataaatcgaaaccaattgaacattctctgatgttagtatccactaggcccataaaaacgatacttgcagaaatcagtattattaatgtttagtcatctcctcaggacttcatgaatccacaactgatttgaaaaaaaacaaatgtgaaagatgaacatgtttaatactttttaaaatcaaatattaaatgatagtttaaaagtattttttaactgaaacatccttttaatagaaaaagagtaatagtttttcaacaagtctccataaagtgattcaaaaactgatttcttgatgtgatttgttgaataataaatcaaagcaaatcaatgttcatatatctttattaaaacaacaattgttacagaataaaactaatttttatcgcttttatttctttctattgcacatatccgaacatgaatccacacacatcatagtctttttcgcatctccttctgtatctgtttcgtaacatccacacacacacacaaaaagacacacaaaatataaataaatattaataagtagtcataatattgtttatcatatgtaaatataaacatcataaaaatagcgcagtaaagaacaaaagtaatattataatttacatgaaaaatataatttatgactattgcgaaaaacttactaagattttcagtagaaacacaacgatgagtaacacaaccaactttgcaattcatttcgggaggaggcttccaacattgttcagaacatttgactggaagtttattagtaacacaaagttcaagacacgagaggtaacctaatatattttgagaattagatttgtttaaaccctctgattcaaccacaagctttccaatcgtcaatatcatcaccacaaatgtgaccaatcttttgttctccattttcttacaaagattttatccttttttggtttggagtggtaggaatattgtattagtataggttgattgaaaacgtttgtttattttgactattgtttcagtaaaatattgcttctttacatagattgtgatatgttgctcaaagaaaaaaatatatatgtatttatatatctatattataaatagaaggacttttttagttgaaaatcaactttaagtttgttattatttacaccccttgtcattagaaaatctatataaatcatatcttttgatttttgcttaaattatttaaagggtctaaaagtaaattataaacatacattttattaaagtttttaaaaaattttaataaagatttttctagttaattcttttaaaaaaaatattataaatataacaacttcaattgtctaattatgattaaatgattcgacattaattttcttttttatagcactaaattcattttattaaagtttcaaatctacatgttattaaaaagaaaaaaaaaataagaaaaaaatagtacccttactgatgtagtttgcttaaattatttaaaagagtttaaaagtattagataataaggtagataaaattcatgaagagattttctcatcggatttttactttctgagtaatgtggcttattgtgcttaaacttgcggccatttactcataaatgagtcttgtttacattgtttaagagattgcttcacatttggtgaaagttgtttttttagttatatgggagtaagtgagtaactaatgagcgattcaatctataatcacaactaagattatgtttgtatgcatccgtcaaagattgaagaccataagatacatatcaatctttatatgtttgatctcaattagtaatagtgatgtcaattgtaatattttttttctaacaaaatataatttcctagaaactaatgtttcgatatttatttctagattcgaaccaactctttatttctacattgaaaacacgatttccgatttgatatcttacatttttcatattccaattttgataccttaaggttacgggaaacaacaaaatcatttttgcagatctctattctctcacacataacaaaatctataagcataaaatacaaacttcgagttatgtgtgtgtactaggattacgtcacacacacacatgtgaagctccttctagttggggtagaaggtttgcaattcccgacaaaattcaacacgtacacaatgagaccagtcaacaacactttacttacatcacattcacattacgtcatccgtaatctaatccaacagtcaatttttcgccacgtcatcatccgctacacgtgtatggctcctaatcctcctcaactcctgaacaatctctttagcatccggacgatcatccttatccgtcgcaacacaccggaacgccagctcagcaaccgccgcaacaccgaatccgtcactcaccgcagccacatcatcgccgtctaacgcaagcaaggggtcaatcacctgatccaaaagacccatttgaatcttggatacaacaagatccgctaaagccatgtccctcttctcacgtcgttgatcaaccgctttcatacccgtaatcaactccatcaaaacgacaccgtagctatacacgtcacttttctccgttaaccgaaaagaccggtgataatccgggtctaaataaccgggcgtaccttgtggtccggtacaaacgtaatcagacgaagtagctgaattcacagtcgtctctgaaaacaccaagagcctagagagaccaaagtctccgactttgattttcatatccttctccacaaagatattcgacgaagttatatctctatgaacaaccggaggaacaatatcgaagtgaagatactccatagctaaagccgtttgcaacgcaatatctaaccttacacgccacgtcatcttcggtcccctgccgtgaagatgatcagcgagagtaccgttagtgacgtaatcgtgaacaagaagaagtcctctcgggtcagagcaatagccatggagcttgacgaggttaggatggttgattgaagaaaggatcaaaatctcattgcaaaaagacttcattgagaaagctttgcaatgctcggtggctgcggcggttgcgccgtggtgatggtggaggaatttaacggcgaggagttgtccgtcgctgagttggcctaagtaaacagaaccgaaaccaccgtctccgatttttcgcttggggtcgaatttgtttgtggcggattcgagttcttcgaaggtgaagactggtgggagaagagcggcggagcggtggtgacggaggaacagagcagccgggtcttcttcattgattgaggataaaaagctagctcttcgtgatcggaaaatcgctacggcgacggagaaaacaagtaagagacaagtcaaagcgaagataagagacaacacagcaatatgattgactcttttgttgttatctctttgagttactaattcggatcttgatttgtggaaacagatgaaatcttgattcgggtgggtcgaattaaacccgcaaacaccattcttgatttgacaatctctgcatttaatgaagtatggatcttgagattcgtcccattcaacttcaaatccaaatctagtgaagaaatcttgaagaaaaccaagaagatctccttgacagccttgttcagataacgacccgtgggttgattcacaaccgtggaggatccgacccggattctttaggagtttacagtcccaaggacaacgagaacagttggggagagtaaaaggagagcaaggacggagaagagagagacgagagcaagaagagtcagagactctgaaaggtgaaccggttaagtcgatgaaccggtttggtgaggaggagaaccggagagaagaacagttgtttgtgttccggttagtgtttgtaatgggagagagggttagagaagaggagattgatgagtaatggaggatagagaaagtgaggtttttgattgtgatggtggcgcgtgaagatgagcattggatctggaagtttgggtggccacatcccggagaagctgagaaagggtacggtggtgaggagttgaacggtgggcaatgaaatgaagaagaacatgaagtagatgcagaggaaggtttagtactaaaaatggtgagaacaaagatgagtagagagaaacatctccacggtggttgagacatgtaaaagagaaaggaagagatctgattctaaatctgttgactgaactttttcgatgtggacagtgttgtgaggaagatgaagaagaagaggcacgtgaaggtttaggaacttgaaactgaagagtttcgattttattctataataactctttgttactgattttttaaaaaaaaattggttttcgactctccctaggcagtgagtgatactcgacctaaaaacaattattttttctgatttaaaaaagagtatatgaatgagagtaagaacaatatttttgcactccttgaaattaaggaaattgagaaagtatatgaatgtgagtaaagagcaaatgggaatatagaagcaaaaagaaaagtcaaaaagtgacgacagacattgtagacaaatggaaaaaaatagttcagattaaagtgaaagctttattttgtcaataatggaaatggatgcttatatcagtctttgaattattactagaaaatctaaggaacttctacttttaacaattttatgcagaaatggttggtgaagaagcagaagagccaaagatcaacaactctataatcaaattaaactcaactcgtttgaagggtgttttgagtggccttaatctgttttagtggagtaaaatgataaagagcttttgagtaatagaatatttaaaccaagtttttcttcatctgtttgggtcgatgggtggttgaatttttttttttatgtttaacacattatgggtcatgaagttgcctatgggatagtttgagtaagctcattgacctactagaactcgttatacgcactttatttttcgatatgaaaatcctgcggaatcacattttaatgttaaaccgtaaaatcacgtttgaaccatcgaataatgttttgtgctaattttccatcaaattacagaatcttgttttgacatcaaaactgtttattttctatattgtttttaaaaagtgacttgttttacctctagtttttttttcataaacttacaaacaaacagttttggattgaatactgcatggagatccaaaaattaaattaagaaagtaatctttgatgctacatctgaatgttacataacttacatacttacatcttgttgcatatcaggatgaagaaacaaacaaacatattcattaggatactcacatctcttggcttgatctgcaggtcctgctcattggtcgtatacattaatgaaaaacaaattatagcttaatttgttcacatatgagttttgtccttcaaacataaagattgcaacaaaaatctaaggaacaatgatacagccgttgatttggagcctttcctccagtcatgattcaaaaaaaagggccaattaatgcgatgcgatgcgacccaataaagctgaccttttttggtgtctcactctttaataatgtctctgtgattaagtttctccatttaatcatgagacttttgaaacttcaaattatgctttgggcttgtaccgtttgaaaaaatcgtattattgggccttcatttcgacccatagaaatctatgattgattttgttgaacagcaatataggcccatgtctagtgctaccgcgtatatgcactatccaagttttgaagcttgtttgcacacccaaaaataaatgaataaataaacaagaagattatgaaatagtataatatatcagattttagatttatttaatagacagtaattgataaaagtcatagtattttctatacttttttcttcttaaccttttatttatttttaagtttgcttatattgatactcttaactcttaagttaaaagcgtgttctacttaattataagagattttatactattaaaaaaaataatattagcaagcactgaaattattgccattaattttataatcttttttttggattccattattatatgaaacttacaaaacaaaatctataaatctaccttttaccccaaaatatagtcattgatctactaaatttttaaaagaacaaaaaagggttgactttttttgatatagaaatatcacaaattacaactagcttcataaaaaagacaaaaaaaatgtatcttgctgtgacatctggaccaagtcagggaggagactaatgatatacagcctggaaattaattttgacaaaatcatccatttattagagtaacaatataattgaattgaaataactaagaaaacacatatgtcacctaacaaaatctacgcgcaacatttcagtttaatgaaattgtaatacttggagaacaaatagtagactagaaaatattgtataaatagttagacaatcataacaaaatctcaccgtgtccttaacgaagaagaagaagaatggagttattcaataatggaacggccgttagattacggagctgtcacgatacatacatctacgccgtcgaggatgaaaaaaccgtccgtcaaagctctgacggaacctcacggcaatcgctatggacggtggagatggttccacgtaaaccaaaattcatacgtctcaagagctgctacggcaagtatttaacggcgagcgagtcgtcgtttcttctgggaatgaccggcgcgaaagtcatccaaacgccgccgtttcgtcaagcggagcatgaaagcgactgggaaccaatcaaagaagagtcaacggttaaactcatgtcgtggaacgagaaatatttacgtgggaacggaggagctccgccgtggaggaactctgtgacgtgtgatcgtgagccgcacatctcagcgacgaagaaatggatcttgtggtctgtggaggttgttgagaatcctgataaggttttgtttgctgatcggttttcatcaccggcttctagttttaactcgtcggtctcctccgacgggtcaaatctcgggtcaccgggtcagaaattgctgacttttggatcttctgaatctatcgggtcggatcctgggtcacttgtatcagtttcttcttcgaaacttatgtttactccgtcaaggtcgggtacattgtccccaaaaccaacagaggtacgcttcaattctaattcatataattttgtcacgcattatcacaacatactatactatataattaaaatattgattttgggggtattttgttttgtaacagaggaaatgttcgaagaagataatagtagaaaatgtatcggcgatggaaatattccgggatgcgaaatcggtgcgtttacgaagctatgcacatcatgggaaatatttgattgctgatgacgatgaagagggtgtgataatgggcaaaaacgggtcatctaaagaggctcgatggagagttgaaatggtaccaggatccgaaaaggcgatccggttaaagagctgccatggtggatacttgacggcgtccaatgagcggtttttgttgggagcgaccgggcataaggtggtgcagtctaggaagattcgtgccgatgagccggcgggagagtgggagccggtgaaagaaggttcaagggtgaagttaaggagcagaaacggcgggaattatttaagagccaatgggggagtgccaccttggaggaattcggttacgcatgatttaccaaaccggagtgctacgcagagttcggtggtttgggacgttgatgtggtcgatattcatgggaccggttgattcattactttaaaacttgtcttgaggctttgacattttgtttgcagcatgaataattttcatattttgataattggttggatgtaattggaaatgcgtttggaatttgtgaaaaaaaaatcagtaaacatagagttgcaacacttggtgtagagggtacttgttctgatttaattttgagagtaatcttagaagagtgtgacttttagacttttagtcctatgtcggaatgagctgtagggtcaatgggcttcaggttattgagatgactagtaagggtcctttgaggtttcttaatgatgatactctacgttttaagtgctcaggtttgttacaaattggtgatgatagcagagaagagagtgtagaggctgtacgaatgtattatatgtttccaaattccacccttaagaatatgtacgttagagtgttcgaatttctctatttgatatagcgtattgtttgtttgagaacgaacaaatgaagtcttatgagtttttcgtatagtttccgttttttgttgttctttcattttcttgttctttcgggtattttgatgtattttgattgttcaaggtttgatatgtagaaatacaaaaaatgatgtcccaaacaaacaaaatgaacatgcaaaattatgtagatgcttcaaaaagatcattaagaatagaagcccccaacctaaacaagatgggtttcaattttttcaagtagagcaagaagcgccaagcctggtgcaaaatatgccattgtacaaatatgtatataaagcatatttaaagcaaaataatgcatgtacaaattacgttaaccaaggaaattaacaatagaaacacaaagagtgtactaattgaaactatctacaaataactaatcgacgtctttttatttgaacgtctttttaattgttatgattagtgaaattatgacattaagtaaggttttcttagttagctaatgtatggctattcaattgttatgttaggctattttagttagtatatgaatttaggcagtctatgcaaatgatttcgttttcattttttcatatgtaaacatcaagatcaagtaacgccattcgagttgatattttttttttaaattagtgtgtgtaaattttggaccgcttatttgagtttgctaatgaagttgcatatatattacgttaaaccataggcaaactaatttgaaacatccgattcgatttcctgtaatttttcttggttaattgaccaaaatcaagatcttcagaaataaaataaaagacgaaagaaagctgtcgcaaagcagattgtgttaaaaaaaagtggattgggctcaaacgcaacttgtccagcccgtgacaattaccctatacgcaagtaagagtaacgtatcactggcaaaagttggtattagttacgatatctttgtcatgggggcatgcatgggcatggcttaagagttaagccttaagaagagtcccacactcgtgactctcatgatcgcttgttgtttcttacgggcaaatacatttaactttattcttcatttattcacctatattcttttggataataacttttctctatataaaataacaaacatcgtacgtttcatttatttacaacaagcgatgagaattaaaaggagaccttaattgatgatactcttcttttctctcggttacaacgggattattacagataatgataatctatatggatgctgacgtggaaaaacaaaatttggtgaaacacgtcaattaagcacgacttttccatggctagtggctaagatcgtttcatcacatggctatatcatataatacttggatgaattcaaaataaacgactgagaaaatgtccacgtcacggcgcaccgctttggacttaagtctcctataataaatacaacaccaaacattgcattccacattaattcgtcttgtgcaaaaaaagacacttcttaagcttcaacaagaaagaaatagtattcgcatagtattagaagatggattttttcaatcaagctaaagccgtaaggatgcgtaacgtccatgataagtatctaacagcggatgaggacgaggaaacggtgactcaagacaggaatggttccgacaagagagctagatggattgtcgagccggttcgtggttcctttgaagtgatccgtttaaggagctgctacggtaactacctcaccgcttcgaatgagcggttcttgctcggagccactggacgtaaagtggtcttgtctaaaccggctcgactcgactcctccgtagagtgggaaccggtgagagaaggttccaaaatgaagctcaagactagatacggaaacttgcttcgagccaacggtggacttcctccatggcgtaactctgtcacgcatgacacttctcatgtattggattctttcttgtgggatgttgatgtggttgagattttggtgggaacgacgactccggctccagctccagctccggtgacaactcctccgccacataggaggccgtcgtacacgtattctccggtttctagaacatcttcagaaaaatccgaagaagaggtattaattaattcgactaggaaaattatccgttacactgtttcactttctttttttaacatttatctgcggaaataaaaactgaaaataatatccaaaattctaaatatctgaaaaaactagtgaagggatggtattaaaatattgtttctttagatatttatagaatatccaaagattttagtaaactgtattacgaaaatatctatcagattttgtcaagattatcgtcttaacattttcttggttttggtttgactagttgaccgtgccgccaccgaaatctgaagggaggcctatttactaccacatcgcggacgaagaaggacacgtggaggaagaatcagccgttggatatgcgttgactttcaaaggaaatagcgtggaacagttgacgcaggcgttgcaagaagagactagtatggatgatgttgtggtctgtacacgccatccttcaaacggcaagctgtttcctcttcgtttgcaacttccacctaatagtggaacaatgcatgtcattctagtaccctcaagtacttaacggcaagctgtgtggttcccctttatttcgaatgtattatataagtagactagtagttgaagtattaggctcaagattgagagtttggtccttgcctagttgcctccattagatacgagtgtggaattaatcatagaaagttcagatagactattattgtggatttgatttaatctttcattttattgtacataagcttattttgtaaacgaagcatttaagtttcgtcctcccattttttatgtgaattcgccataaaaaattgtttgtactataaaagttttttttttttttttaaatattaaagtgtaacccaatcattgcgcaagtcttcaccaactctcccactttgataaaatgtgttactaaattgttcttctactaaagagctattgacttatttcaaaaaatcatatgaaagatagaaaaaacgatacaaatcgctgatcatatattttatattacatgagacacgtacatagcaaatccaacatccaattcctttacaacacaaacaagttttattttgttgaatcgtcgttcaaacattttatctatacatagtagtaaactatatattcttggcgtaaggtgatgaggagttttgtttggcgtgttaggaattcaacgttcagaagaaggattgtgtgtatttattgagtttcctctctaactcatcaaccttcacacccacaaccatgtctacttctcggcctcttttcatgaatacaatcgcaggtaaagtgctaaggttgaactccatccacacgctctgtatatcaaccaaacactattttataactcaaaagcaaacacaaattttgttgaaaccttttctttagactttgagaaaaaagatgaagaaaaggagaatgattatttattaccattaagacatcgacatcaatcttcacgaactcaacatcggtgtatttagcagccaactcttcgagctttggttcaagggttttacatggtccacaccatttagctgtgaactcgatcaccagctatataaaaaacatgaaaagtgaatgttcattatgatattttcaaattaagcctaagagcaaggttagttgcattgtgctaggagtttcaactcgaaaataagaagaaacctagagtaatatggttgtccctcaaaataataagataaaaagagtaattggttgaataacttgcgagtgataattttcaactggtttatctcatttttctctgatttgctcatccaactaacgttgaatgggatgcataatttatttcactcttctttttttgaatcccaaactgtaaaatttgagaggatttttgtttcactgaaatatgtaaccatttgcagccaactataatagcctaactttgactcgatagaatgatccaaaagggatatgattcgactttagagcgagtttttttttagatgagccagaagagtcattatcttgtgagttgtgttcaaaatctcacctcatctttaaactgagatctggaatatgatgaatatggaccaaactacttatttaccatttagattgagttggaagttcatataagttaatgcattattgttatgttataaatgtctcgaatctggttataagaaccctagttcgaatacttttctaaaattttaaaaatagaatctaaagcaaaaatggcttaacttagattatagatcgcattagtcaatatattaccagcttgttggtgtctttaagagcgttgagcctagatttccactgattcatgttcttgatctccacaatacaaggactgttgactttgaaaggataaatctcaggtcgaggtgtccatggcttcgttgaacggaagtgggttacctgaaatctctggtctggagtagaaacgttagcacccattgagtgtgtctctctctctctctaagcagaaagaagcaaatggttttgagtagaagctcttagtttgagcacaaggagagcggaagagttggcttttatatataacgtcaaatattctctggtggaccaagtagccgtaattcgtaaccaattttaacactacattttctattggctctaagttgtagcgcaaaactatcatatgaagtaagcggaaagttgcatgtaaacctactttagtaatcttaaagtccaaattaaaaatcaagttgtctagaatcagttcgtgaaaactataaagttataattggaattctaaatagctgtcttacgctatatctatcgcatgagtcatatccaatatattgaataaatctggaattgtataaaacgttttattatattgtttgttttaagtttaggatataatttatttctatttatttatccatccactgattatgcaacctaaattttaagttcaacgtgatatccacagctatctctcttctatctttttttttttcgttagtgtgagttactttttagactcgcaagagagacaacaatggtggcagcagaagtgtttgacccttttacagccgtgaaaaaaggattccaaatctttcacaatatatgattcccttataacttttcattttaatttagttgattttgtatgaaagcttcttttggattttctatttattagctaacagtaaaaaagcatacaaacctatatactagttatttatttttgtcaaaccccaatatattaattgagtgaataaacgttaaaacggaattcaattgtaggttaaatgaatgatggaatatacagcatgtggcaaagaggtagacacaaaataaagcagtagatatttttgcttcatgccaaatatgttttggacttggtgttctagaagtctaatatgatatatatatatatatatattttttttttttttatgtacccaagaagtctaatattaatattaacagtaatagcagtagtagcttttctttacaacatattagttgggttgtactcatttaccgtccgtaatcgataaaggatgaaactatgcctaataacgtgatcctccatagaaatgatcaattaaaactatactgtttatatttctatcaagtcataacatagtgtatatgatatagttccaaatgcaatccatctaactagattacttttatgattttaaatatacttgttagagatggttttctgattccaggcagagagtatgatgacaaagttataaaataagacaaaactgtgaactatatctaacacttctacataatgaaaggtaaaattttattaaatattctagttcttacatattatgatacatacattgtcatagtaattattcaaacaacatcgacaatcttcttgttgtccctaaggatagtctattaaatcatttcatcgatttcttcgaagtcatctcaacatcatcggaggacttgtcctcctcaaagtcttcaatcggtaaaccgaccttgtaccggtatccccgagcacaataccaaaagtaaaccagattaaccacacccaaaaccgcaatcagataatagaagtaatccaattttcccgcgttgagattcttgtttagccaatccggacgatcatgcccaccggagaatttatgaacgacagtcacaaggaaactactaaggtagctcgaaccggcgaacgataaagagaagagagagttagcgatacttctcatgtgctctggaaactgactgttgaagaactcaatttgtccgatgatattgaatgcttcacatagtcccatgagaattagctgcggcgaaagccaaaacaccgacattggagtcattcccgttggatctccggcattgatggagcgtatgcgtctcatacgctccacaatgcccgcaacgatcatagaaaagatcgcgaaaacgatccctgttcctatcctttggaggagtgtgattccggatttatggccggtgattcgccgcatgaatggtacaaaaacgcggtcgtagaagggaagaaagatgccgattgtgaggagagagatgacggagagtgaaccagccggaatctcgaatttaggacctaagtttcgatccattttcaaagcttgagagaccgtgaaagtgccttgtgttgtcatggccgcgagtgagattattccggccgaccagataggaacaattcggatcaaacacttcacttcttccacttcttggacgctgcataaccgccacttgtctgcgggaggtccctcgggtgttaggtcaccttctataaccaccgcggctttgtcaagacacctaattttatgccatttcagttagactataggttaatacaaaatcatgtaatcagtgttgtcttaaaaccaccttgaaagtgataagcaaaaaataaaaacaaaaatcatatattaagtacctgaattggttactgcggtgtaacttggataacacgctagacttgatggctgggtcgtaataggtgacagtgccgtcatcttccgccggaagtttcagctttcgcttcttacgagctgccacgataacttgagcgatcccagagaatatacttccttctggtttaacgtagacataacgcttcattccggcaaaaaacataacaaccgcaagagccatgagtccggtagggatactaaaaccgataatccaactgacttgatcctggatatacacaactacggtctgtgtaatgatcagaaccacagtgaaagtcatgtaataccagttgaagaaactggccactcctttaaccccttcctcagttcgttggtcaaactgatcaaccccaaaagggatgctacaaggtcgtattcctccactccctacggagaggaaacagagtcccaatagcaaaactccgatctggagcttattcggaccgccgcaactgagtgggtcctggctgttgcatgatgctgggtggagttgaggaaacgatgctgtgagtgtaattgttattagtccctgcatgttgtcaatgtaattataatcagtcattattaattttgaaaccgattcttcattattagatattctataatatataacttgaaactgaatgattgttaattaatattgaagaaagcaaacagtagtgtgggatatatagattgaagttatgcgaacaaatacaaacaattaataaagtttacaatagtcttaattaggtttgacttcatatgattgaaaagtgatgttaccttgattaggtgaaagtgacagtgacgtagaacctaatatcatttatttctgttgtaaccctaatatagtaatatgagcatttgtaacagtttaagttcaacgtttaactaattacgaaaaagacaaaaaagtgcaagagaaattaacaagttggatgcgatcataattctataattgtgaatgaaacagacactagaaaagtaactattattatatacgtaacgtcactgtgatactgaccaaatctaaaacccaactagctagctaaatcatcaagaaactcaaacactcaattattggacaatctcattgtcaataatctatattgaccacttgcgtatctcttccttttctacgcacatctctttatctcttaaacagaacacgttctaatacgtaactcctttattggaaaatgtttcatcaatgaacaaaagatgtttacgtgagataagtattttcttaccattttttttggatgttatataaattttcaaggtaaataccgacaagaataagtgtactaactaatgcttttgttcttatgattcacattattgaccgaccttatcgtcctcgatagcgtggtccctcaataagttcatgcgttttcgtacgatacaaaagtaatttaatagcttttgatatagaaaaaaagagagtaacataataggtataaaataatatataaagtgttaatactttgtcatttacatatatatatacttaatttaatttgtctatacgtattttcttatcatgtccacgtgcggggtgaaattatgtgccaagtatcatgtatcgtcgccacacacacaaaaaaacacgtaaattgagtagtaatatagaactttctatttagagttgttatgttttttgttggatgcaactattcgaacagtggacgctaaagcactgacccatgctggcagtaggccgcgaatagttgcggatttgaggtgttaggaacatataaagtaaatactactacgtacgtaaatgttgtgtatttgtagacacattagattatttatttttattttagttttttaaaaagattatataaaattttcaataagttaaataaaaaaatattatacgtacgaggagagtggcgaatgaggcgaaagcgatggtcttgaagcggccaacataagtgtctgagatatacgctccgacgagaggagtgagattggtgaaacctgaccaaatgttgatgacatttgcagcgtcgacttgttctaagtgaaacactttggttagataaaccatgaagtttgccaacaatcctatcgatcccagtctctccagcgtctcatttcctattcaacccattttattacaaaatattatcagcaaataaatcgacaaataatccctctattgaagaatatcaattatactccattttatctagtaattatcatcactaacaaaattaatcatattccattaaatagagagaaataaaatattataaaaatttaaaagtataaaataatttaaaatgaaagttaacattttggctaaaagagcacttatgatgacaaatttttattccatttcagttataaagtcgtcagctagacgagtgtcaaacatgttggaccgacggttacgagagtaatatataatataatttttgatcgagctgaaaagattatgcgctcatttcttttgttctgactattatgtgcaatgatttaggcagaacgtgatcttgcaacggcccgttacatctcccaatgataatatattaactggtttctagaactatatatccaattaaggaaattaacaaaaaaatattagccaataactgaggaaaggtcaaggattaggtaaactaaattatgtacacgaagcctaaaaataaaattaaaatacctaaaatgaacgagacggctctccatcctccaggctttttctctaccttctcagcatccaatatagatcccggcgaacttatccgcttgtagggatcaacaacatccaactccgacggtgacgatttagagaaactaccggatcgtcccggcaaagaagaaccgtcctttctatcctccaaaaccatctctaagatattactacactcgtgatatactcacttcgatttcggggtggatttaatgttgtgagaatatattctcacttttttgcaatcaaggtaacacacatgaagtgattgataaatgtagagagtgggcacaacatacagacactttctctttgttagaagcttttttgggtgtagtgaattatttgtggaagtgtgtatatataagggagtgagtagataatatatggtgggtgtgggtaaatttgaatgacgttcgccactagtagcctccacgtgagaagtttgaagaggaaaattaaaagaaaactattttagtgctatgttttttttgtttttcttacaccgtacgtaacattattgttttgttccacgtattgtgaaccttccatgttccatacaattgtaacgttaaaatacgatgttaaattaatgaaccatcttttacagtacatttgcatcgtaaggggttgatggatgatattttttgttcacgcggttttatgtgtgttgtcggtcatatatatggtatgatgtgtctcaaaaggacatctaatcttttttacctaaaaatgatatgatatctcataaataagcgagattttattttctctaaagcatattttatttttattttcttaaaggaagtgagattgtatcgattttttctattaatcaatcagttgacttagttctacactttaatgatcctgacaaaatcttaaaatttatatagaaccttttaaaatttttactattattgatagagataaacatttgtcacatttatacgattttgactcatggcgatagattcttcgaagttaaaactctctttcaaactagttaataagagtagattttatttactgctttatacaattcacacacttgaaacgtccaatatgtcatcttggcatacaattgcttgttgagagtcgttcaattggtaaacaaataaataaaactcaaaacgtacataccaacatgatctaatatttttgcacaaaaagtcatcgcactctaagatgaaccttaaactattttgggttgcaatcaaacaaagaaacacatatcaccaaaatttaatataataaagttagaaacaatagtacacatatagagctggccttaaaactttggaagctcataccaaaaaataaaataaaaaaatgacatatcaccaattaatacattgagatgaatttgtgcaggaagtgattaaatttcgaacccacttaatcctcctaaaaatattaacagaatttccgagaaagaaactaattctatttattcgtatataattttatacgattgctcgaatgtgtggtacatatgtttatctagatgttgagttgagaaattccatgtctagatatttttcaattctaaattttcattgatttattgtagaaaaaaatattaatcaaccacttcaacttcaaaacaattcgcatcatttttttttctcaatgtaaaatatatattatatatagaaacaatgaaaatcttcacaagaaatgaacattaataataaaattatcattgaatgtttatgttaaaggaaagattaagtccaaccaaacttgtaaaattcaaattgaacacaaacataaaaatcggtgagtgaagacagaaacagaaagagaaatacgataagatgaggtaggcttttatcgccttttaggcaaatgcaagtgcctaacactgtcgcatgcgcgagccatcaaatttctacgcaaaccctctttgtcttttcttctttattaatttttttttgtttggacctttacgtgggatcctataccgtatcaccgttcgattttatggtcatattattgtacaccgttcgatcatcttatctctcttcaccattctcaatggtcagatgatatgaaccgtggactgggtgcctaaggtttggactgcttttactaatctgtctcaatatgctgagctgtgtggtgcgggtcactatcaaacatatgcattttaatggtcatgatcgaataacgaaaaatgtatatggagtttgatagataactccaactcttagaaagctcactttttctattttgtatttgagaggatcatatctaccgacttcatatggttatactaagagatatttatataatatcctcttataaagtataccataattacttactaaagcatgttaaatgtgggaatacatttttgaccctgctgaaagaaacataattattaatcatttcttaagttactatctcaagtatgttataggaaaatatttgcacctacatatataaacatttgatcatttttttgtagtatatactgttagattgaattcaggtttttgatataaaagtcgattttttataatccagttgtgcataacaaattcatcttttttttctttttttggggagttagatgaaataagtgggatttcaagatcgtatccattgtgatatatttagagtcctaagcaaatctaaatataggttttcatgattatatcataaaactatattcaaaagaattgtgttttcagcgtggaatacatgtcttcaagtaatgaattcatttaagtctaagacacattacaacattaaagattctattagacctttaaaccaataacatgaaaatagaaagttgaagattctatgaaagggaatattctgtaactttcagaaggcaagagctataagcctaagaagtaagagaaatcaataagagacaccttcgttgacttgtattctgtttcaagtgtgtacaagaccatgacaaggatcggtggaccatcgtatttgcattcccactttgtactcttatgattaatttcaaattacattaaatacactgatcacatcatattaatatcagtatgacattttgcttcgaattattattacttttttttcgttggtcttttcatgctgatatttatcaaaagagctggcaagaaacatgtgactgcaaaggtttttgtagaagacttttgagaatttgtgtttcttgttattctaactaactgatgtttgtaattaatctatttcgtaaatattaaaagttaatgttatagttttagttttcaattgcaagttaattgttaattttctgatatttattattcatagtatttgttattgatgaacgagctagaatatagagttagaaacatatgcatgtgaactgtgaagataaacaacccatagggttgatcaaactgcccaccaaggtttggatactcgacaatcttttgttgctgtcgactaatagtcggtattctaattattgaagtaatgattttattttatttttagttaagatgaagggaaaatttattaacatcacccaaactcccaaagtcaaaattacttgaagaaaatatgaaaattgtatattactagacgtattcttgaattaagaatgttattattattaatatctaataatagtggaaaagatattttgaaaatatataggaaaaacataaaatacgatgataaattaaacttttaaaaattgggaatactttctttcaagtatgcaatggaaaaaaacatgattgcaaatagaagaaaaaaattggtagtgaaacaaggaaatatacaaccaaaaaaggattaagaacaatttttaagaaaaatggaattacggctactagaaaaatatataaaaaagaaaacgaaaactgaagttgtaatttttcggaaatgtgatcttataattgtctttccaagactttgaaaattagtgattcctaattttacatgtacttatatcataatcattttgagttactcaaatgtcgtcagtccataatacaagtggccggttctcatataatcaaagactttcaaagttgtcactttcgggagcacatctaattttgtttacaagactatacaaattagagtgtttattcttacaacatgtaactaaaaataaaaatctgaagttttgaaaaatgtcaaactaattattgttttaaaactgtgcagattctccactcctcatttccaacatgtcaaactaattattgttcattactatagtttctgtaacgataccttcgagcacaccagaagaagaagatgaaattaagagtgcttaaagcggcaataaagtaatagaaacaatccaacttgcttttgtcaatatcatccgttagccaactctgtcctccacgagcagtcacactatgaacaatgctcaccatggcactgcttagataactggctagagacaaacctaagtaaagcaacgagttcccaatgcttctcatgttgattggaacttgtttgttgaagaactcggtgagaccaacaatcgtgaagacttgataaaatcccattagtacttgttgcggggttagccagaaaaccgacatttttactccattaagcgataaatctcttctctttcgctccacaataccggatatgagcatcgtcgagatggagaaaatattcccaatgccgactttttgtagtaacgagatacctccgttttgttttgtaatgttttcgatgtgtcggaccaaaacggtttcatagaagggaagccatatacctatgtttaataatgatatgacggttatagaagcaggagggattaggtaagaagtgcctggaaattggaggtccatttttagtgcttgtgagactgtaaacgtctgttgttggttcatagccaaaaatccaataatgctcgaagcaaatattggaataatactgattattgacttgatgtcctctatctgtctcactgtgcaggttctccactcctcatttccagcttcatcattgttcatcactatcacagctttgttcaagaatctggaacaaaaccaaaaaaacaaaaaaaaacttagtaaccacaattatttgcatattgacctacattgataattatctccatttcattataagtatctttttagatttttatctctatacttataaccactatacttccacccaaaaaactttataacatatacttattatttcttttgttaaataacttaacatgttaaagattctattatatccctgcaaaaacaagttaacgttttttttgtcaaactaaaacgagttaactattagtactatttttttcttgtgttgaagttaaattatgtgcttataccaaaatttaaattggaaatccaaaaacgacacttgttttaaaacaaaattacttgaaatggagaaatggagaaacggagtaagggcctaactaatttttacctgaattgatcagtgagtacgagtttatttgattgtaaatctgtctctagtaagggttgatggtagtcaattccagaagtaaaccgtgccttgcgtttcttataagcagccacaagaaccttgaaaactccagagaagacacttccttcgggtttgacaaagacataataccgagtacccacaaaaagcagaagaagcgcaaaaaaattgagaacggtcgggattgcgaatccaatgccccaactgatgttgttctgtacgtacaacactagtgtcattgaaactaactggacgattgtatgagtggtatagtaccagctaaagaagcttctacttccttctcttccttcttcagtcgaatcatcgaactgatcgagactgaaaggaacactgcatgaccggattccacctgttccaactgataacaagaaaagtcctgagagtaaaacgtataactgcgaatagctatagggaatacattgtccagtgatttggtcggcagtgcaaggtggtggtcgtagattagggaccagagacgtgaaagtcaacaccaacatgccctgttgaagttttaattctttgtcacgtaactaaacatttggtaccgaaaattaaaaaaaccccttgtaacgttccaaacactgcaaacaaaagtatggcctcatttgtatcaaactttaatttatgtgtttgtgtttgcatttacatgtgaaaaagaaaacaaacaaaagctcttttttaaatgctaaaaagttggtttcatttgcaataatagaaaaagaaatgtaaaagcaaatgcaagcgttaaaaaggttaacaaacaattgagatcatatgcatttcacatgtaaactcgcatcaattaaaataacagaaaattgttaataagtaaaaaaaaaaaattaccaacaactcagcgatggaaccgaagacaatggtattaaattttccggtgtaggagtcggagatgaaagctccgatgataggagcaaagttggtgagagcagaccaagtgttgataagagtgacagcttgaacttggtccatatgatactctcttaccatatacaccatgaaattcgccatcaaaccgaatgtggcaagcctctccaatgtttcattccctacatcatcaatattataagccgcatctttttttttttttgtcacatattataagccgcatcttatatttaccaaaagatgagacaatgatctaaatttggacagtgattatacatacctatgatataaggcatcgctttccaaccaagaggcttcctttgtctcgtcgttaaatccgaggaacttgtccctttctcattgtccatgctttactcaagtcttctagtagacctctttttttgtttgtgttgaggcagatgagttcaggttctaatagaagtaaaaagatggcttatccatatatagaacaaactaagacaagacgtggacatatgtaatctcaacaaaatatagttgaagatatgagatatatatttacacatatttctttccaagatcatggaaaaaataaaattaagataagtgtcagttaaatgttcaatcaatagaattaagctatgtgtcacacaagatctgtttattaaataaaataaagtatttgaaaatatttagcaatatatagtaatacattttagtaaataaaagtggtggtgacaagtaatgaaaattaaaagagtttaaactttaaaactaataaaagtattaggaaaaaaaggaaagaaaaaaaaaaccgacaataatgaaaaccttataatcttgacatcagctataatgcatttcaagacgtaagactcacaaaatacattatctagtactacttataatctttttgatggagtcttccttaattgtcagtcatttgcaaaattatttgcttgtgaatttattcttaatgattattgcagtgtttgaatgtcgaagggaataatctaagcaaatgtcatgtcttcatcatggattcgctgttcgagtggaagaggaactcgagttccttcaacttctaagttctcctttctttattagtatttttcgaataaaataaaaaaccaaaaacaacttttatttatttgggttccactcattctttttgatgtttgctacttttctttttcttggatgattaatctccaagtctatgaatttggttaatgtgtttgtttcggataacaatttttttatttcatttggttttaatgatgcaacctgataaacaattttgtaccgatgatcttataaagcaatagacaacccagtgaaattagtctttacgtgttacgcaagtaggtacattgcttgggctagagaagaatcagtaacttttggaatgggcctgctttgaatgagcccaaatttgttggatttgggccttaacgcaatcatgattgaaaatattaaaactaaaaaagacgaaagaatcgatcgttctgtaagaacacagatagcaaaatcaagaacttttaccatttatccaacgagttcttgtaaaatcagatcagagttgaaaaacatcatcgacacgaaacgatcacaactgattcgtcaacgatgcttcagttgagactcgaatcgctattatcagagaagacgagaagagacgttgttcgtgtgaagaaggagaagagagaaaatgtttgatttttgaaattcaaaattaatgaaataacataactgtctttcgattaacaataaaacaaattatagccattttagcgttttgagcatttaattgaccaaagtacccctaaaatttggcccgttaacatacaatttagaaaatccaaaacaattattatttcttaacaaaaaatctataacggtcaaaacaaaacaaaaagttagatacaaagaccatatttttcaaatgacacataaaaccaatttttttgttttactttcaaaagacattaacaacaatttatagatattttgtcccaaaaaaataaattaacaatttataaatatacgatattttatttattttttgtgtgcgacggagattggttaattccataaataattaaaaaagtattaaaaactaaaataagtggaacaaagggactatgggttagattaaattctcccggctctttcggaggcaatcaaattacagtaacttaaccaatcacattttcgagggtttatcattctttaatatctttgtatttacgtaaatgatacgtctcttgtgtttggttcaggaatcagggctacgctttagtggtttagtaagcaacttacaatcagaagtagtactaattaggataattaattaagacaggattacgcagctttcaataataaaatgctacctaatcttaaactaattgatacgtccgaaacattccaagaatgtgaatgtagtttttaatattaaatattaaattgtagttctaaaagattttgttttgcgtatcataaacatgaagaattagattttaacccgcggtataccgcggggacaacttattttttaaattagtatataaaaaagtttgcaaattaaatctatttatttttattttatagtttacaattgttattaagtaacgtcctactaaacccgtctcgccaaatccgtcccgtaaaaaaaaaccgcggtacaacgcaaatttaaatatataattaaaataaatattttacgggattgcaattgtattttggtttgtcaaaataaatatttgtttaaaatagttgccaaaatctagtttaaattttggagaaaaaagatttattggatagataaagaatgtatttaggtgggttttgctcattttaagggattgcaattatatttttgtttgtcaaacattttttgttttaaatagttgctgaatatatttggaatattattagtttgttaatcaatttattgctggaaaaaatcaataattaaaagtcaatggcagccattgtaaataagtcccaactccagaatttatttcacaaaatggctgcaaaaatgtatatatagatgcaaaagtatctgcctaaaacaatagcataagaggttggcaaattgatgattagtttgaaatagttttataatatatttaaattaaaccgaaagctacatgagttagagctttggcctaattacaaaaacaaaacccataaaatttggtcagatgctgacttggccaaatttgtcagttacaatttgcaaggcctttgacgcttttgattagaaagtgacaacacaaagagataagtgtgagatttcaagatagtagtgttgactagttatatcacattcttacccttttttagacaggcagataagctaaacttatacaatgaagtcatgaactatatttgatcatctatttcttttctttctatctaaaatttttcattttctaccataatttcattcattacatttgtatatttcaaagaaaaccttaagcattgctaatcaaaaaatgaaatttcgattttaaagcaaaaataaattctgcagctaaaaggttttaaagtattactagtatataatgaatttgtcttgggataatgaatttttaataaatatatatttatcagaactagaccgttattaaaatgctcggttagataaaactgtttttaaaagttacctactttctactatagctaagaaaattagaaaaaaaaattattttgggaagacatgtaacgctattagtgttccagtttcaatagtctcgtgttatgagtttttattcttaagtttttgcatgttaactctgtacaattctatagagaaacagatatagttcgtgtttatatgtatagaatgagacatatatataaatacacgctaaaatgaaaggaaaacgatagtattttaaaatttcgtgttatagaaaaatacaaatacaagctaagtcatcaaaagtgttcaaattcagtaaaagaattcaagttgttgtcagaatcactgaaaatatacgcaattaatgtgcacaatttaaaataaacctattcgagaacaaaacatttgtgtccggcagtgtcagatatagaatgaaaattcataattggcccaaagatagtggtatataaactattccaatattcacagaaattgtaaatcactcgtaaaaaagtacctttgcttcaactttttcttctaaatgtataaatgctttttgataacactgtaaataacaagagccacgaactgctagaatatcaattccagtggacatcagaaaaatatatatagaattctgtgaacataattaatcgtatagattgatatcaacaaaaacaaaacaaaaaactagtcgaatctcttatcagctaaaaaaaattcttacttccatcaataatatgtattctcgtgaactcaattttgaaactcctttaacgacatttacttttataatttgtctaagttgtcactaaaattcgacagaccaatcagcaggacgaataataacacttttctttgttcctttttttaattagacgtaagagtttcgaatcatcaacctataatctttttcaatagctaaagtcagacagcgtaacacttgaaaccgtaactgtatgttttcgtaaactttcacactttacaatcattccctacgtttaaaaaaatttaaactaatcgagggttctatttacagccttaagaccaccgtatacgacggagaaaatgtgagtataacgtgacaattgcaaaattggttttgtcgggtggtgaggaaaatggtcccactcccacgtttcattgaggatagcatccgaaccgaaccattggacggtgtggatagattgagtagagaattagttagtactaattaaattttgtaattaaaatcttagaataattaattctgtaatttagaagttaaaatatcaacaagaggcagataagatattaaggagaggtggtctggattcttctgttgcatgcttactccaagccgtacctgtctttcctttgccacagaatagttgacttttctcaacttgtcggattctttcttccaaatcttcaagtatatttttcgggtgtgtgagaaaattttaatatttgtggttggtttaatttacaatttttcttgttattcgaatttctttataaaaataaattctattttagatattttggattcgatgtttaagtattttgattttttgagtgataagttctaaattaagtaatttaaatatttattttatcctttctattacgtcatattaatatttatatattgtcaacattagtatttataatttatatttttagtgtattactaatgaatcttttttttctacaacgagtgaatctaacttcatgcagtatatatatttagaaataacaattctatataaatcatatatatatatatatatgcttatataaaccatagaataaaataaaagagacgcttttatctacaatgctatacactacattcatgataagcataaatacatttaccatttagatcagtggctctactacatgcacaaaactttagttacttgcatttatttaagctacataatttgcattattttggaatcgatagatttatggatttcctgatgcataaaaagttaaaaacattacgtactacaagcaatacatactatatatcctatcaacactagcatgtgctaaaagacgactgtaaatgcgtaaatatttactttacgtttgtctttcttcactgtttgtcattagcttaggattctcaccaatttactaatttgtagagattctacacctctctttaggctatatatataatacaacctaggttgattggaatgtaaaggcaagggaatcatccccactttcagtaatatatctaagctagttgataattaagaaaaaagaagaataattatcataaggaaacaatggaacagttgttaaattattcaaaaactataaatccaattataattcaaaaaataaaagatgatgttaaattattcataaactataaatccagtttttttttttttttttttttttttttaatatgaggcgaagttatttaacgtacctacaaaaaatctctttcacggcgaacagaaacggccaatcctcatgctcatgtttgggtgtagagtcaactttgattatccacacagggaatatattcgtgaaatttcacctggcattatctagttggggctaagagtcaatacgaatccatgggagctcatcttcacctgaaaccacatcttgttctcttcctcattctcatttgattaattacttcggttgattagtaaaatcataactcttttcaaaacttattcgagaggttacgttatgtctttatctatatatgtcatatattttgttcttcaccctttttaattgaaacatatacctatatagtgatgatacatgtacccatgttcgcatgtgtaaacatatgtacattgaaattttttcactgaagtgactatgcctatttgaatttactaggactctaatacaaagagtaacaaacgaaaaaataaaaaatttctatatattagtgtatagttttaaatttatttttaaccaactaattcagaaaacaggatgatgatttatgttaaattagaagaaactatttattattaaatattttacatcatgaaaggagataacacctcgagtaattacaattagttttgagttaaacttcttttaactattcttaaaatcgaaatattagaaattgacattatcattttaaacaatttcccatgaaagccaactttagatattactcattatacaaaatcatgatctaatgtttttagacaatgactccaatgagtgctgacttaattagaccgtccaataattcaggtgcaattaaataaatggaaaattttaacattatgttactttctaacatatatatcattggttatacagtttgcagacccctgcaaggttggccccaactttagaactgataatataagaaataaaaaagcattaaaaagaaaaaaaatcttcccagcttcaagtcaggtccatgaaatggagaagtcagcagtcaaacatatcacagctcatatacagacgagattataaaagggaaatagaaaaagaagatataatttcacgggcagtctaaagaactttggttatgaatatttcgtataatttaatgtcaatttgttgtatgctttatgaaaagagagaaagagttctaaaaaattgaaaatgaaataaataatgtagagaaaagagagggtcggtcactgccacaattaagcggaagtggagaatggttggtatttgttgtgtccttcaaacctcaagaagcttcaatctcaagatccttttgttttattttctgcagattactttgtaaaatggtttattaggtatttttatatttgcaacagtctttttaacataaacagatgatatctaattctatcgatcttgctaggaaaaacaaaaagagaattttcttctcgagtctttaacactttagtgcagaaatttatgtggtacgcttagtcaaattcaataattgtttgtaaatgaatccacagagttgaatattggaaaattaatatattgcggctatatatttcaagataattaatgtttcggattttttttcggtacatgctttctaattcaccggaatattttatttctcattgacaattgtgtttttaactaaaattaacaccaaaaaaaaaacagtgttttaactaaaggatgtggtttgttgtttatgttaaccacaacaataaattctgaagagaaaaagtttgcaatagagactgaaccaggtttacaataaaattccttaatggaagggaaataaatcaagaaaacaaaacaaatattgcatggataagaaaaacacgacacttgtctatgcaacttgtttctttagttgcatgagatcactttaatgttaaagtcctcccaaacagtattggattcttcgttataaaaagacctcagggtgattagagccttgtccttgtgaatttgaatcatatactccaacatgtatacacgtacacacaaatacgtattcatatatggcactggaataatcaatatattcaattctgagaatagtagaatagcactggcctaaaaaaaaagcattagttaaatttcagcatattcttgtatccatgccatgataatggttactttgttgttttattgtctattatttctattatatatgaactttcaatttgaattttagatatattggcagtacaaatacaaaaattactttaaccactatagctcctccgagcattcgtcactgatcagtgagtgtgtgtttatatatgcgatattaaattaaataagtttttcttcacactgtgtgtgtgtgtgtgtttgtgtgcgtggtaacaataaagttctgcgtagacgacacgtatccaatattaatggagttccgaaagaaagatcttctggcaaaaccatcatatatagagacaacagtttattttatcttttaaacaaaaatacgatcacattttttttacctaaattgctaataaaaagtacatagaaaatggtttacaaatatcagccattaacatatatagttcaatattacccgacaaacaaaaacatagtttatttatgattctatctcaaaagaatttaagacgtcaaaagaggtaattagtaacatcattttattggagatattttgcaatgaaaactgccatgaatagaaagaggaggaatcagtaggtctagattaagtgaatgttctacttcatttttgttttagtcaaaaagatagtttcactaaatttattttaaagccattaagtggagggcttgattccttccatcacctttatcttgccctcaactttttttttttggatttacttgcatccttctccattaaacaaaccaaacccaaatatagtgtgtattttatttaataattatgaccagataaatgtggtagactaaaagtttattttacgtgaaacaatctatgtcattctttaactatctagaagaatttagtgttcattaacatgtaaatgtgaacgaataatataatgtgagtaatcgatatgcaatcaatccttaaactttgttaccactataccttgtagagaataatagaacaaaatcaattctcatatgttaattggtattggaaaccccatttcaaaatcaacttgcatattaagtaaagggaaaacaaacatgattgattagtctttattccaccactatattactagctttataaattcttggaattaatatcatctttagtgccctaaaaacaaagaaataaagctagttttctctagaggagaagaaaacaatgttatttcctaagaagagcataaagaaaactacaacatgaagtcattttctaataataaagagggcccaaattcttctttcttctcacccaattggacccttcctcaatcccttctcctctcctctctttaaattccgctaatacccttctcactttcactcttatatttcataaaaacctttttttatatctcctctacctcaaagtttgagagaaagaaagagagagaatggtgggttcttgaagcttctcacattattttcttcatcgttcaagaaatcaatatttgatgatgtttccttttatagaaatatatgtctttttctcaaagtcttgttttgttctttgccatattattacaggaagtggaagaagaggtctcaagatgggaaggctacgccgattggagaaacagagcagccgtgaaaggccgtcacggtggcatgctcgccgcctctttcgtcttaggtcagtttcaaaattccaaatttacccctcgattctcttaatgcatctttttctttatcatccacacatttatattaagaacgattctctaatggatcattgtgattgattcatatatatttgtctcttatgaagtggtggagatattagagaatctagcgtatttggcgaatgcgagtaatcttgtgctatacctaagagaatacatgcacatgtctccatcaaaatcggcaaatgacgtcaccaatttcatgggcacagcttttctcctagctctcctcggtggtttcctctccgacgctttcttctccacttttcaaatcttcctcatctcagcttccatcgagtttttggtaaacctctcttaatcattcttataatcacttcatttttttacattttgttaatctttaaaatttctaaacttaacaaggaacaacaaatcaaactccacttataaaaatattcagaaactttgttatccattagattactttagttttcttttctctatcgcttaagttttaagttactaccgttgacttttgtttttaatggctaagccaccacaatcataaatccgttcacattaaaatagatcccacatgtatatctatacaattattagcataaaagaaaattatcacacatgaaaatatggttgtagcaaaaaaaaatccaacgaaccatgcgtgcattaggatgctgataaaaaggacaaaagcaaagaggagcgtgactttgatacggtaccgtatccgtatctataagcaatgctttgttttgatcctaacacgacacatacgtgataacatctataaaaaatccgtatgttaaggtcgggacccaaacgtatttttatcagttttaactgtcactgtctcagggttaaaagaggaaatttaaaaactctttcttgggtttcagtaacacagcaagctttttattttattttgttatcttgtctttacgtatgatagggtatgaaactataatgtccacttatataacatctgccactcgtaccctcgtgactctgcaacttaatgttacaaaagacaaaacaaacttgtagttctaaagtacagttggggctcttaatgctttgtgggtagcgtttggccggacgcaaacgcaaacgctcactcttctacttcccattatggatagagatattgatggttcatgtatacctatacactatcataacttcattagaaaacttataacagattacaagaaaatatatatagctgacttaacttataatctccttgtcactttttatagatttgagtcatttacttgtatgatatgaagtatttatattccatatacattcatctagaatcaacatatatcaatatatgattggataatgtatactagagtccaaaacttttaaaaccctggtgttacgtcagtgtaaccgaagttatttcttcaagaaaaggcagtggccaatgaggcgaccacacgaaaattaggctttgtccatacctcatttaataacgaacgacgtttcatcgttcataacggtttcaattatttgtatcacgtcgctgatctgactctcacgaaccacaagggttaaaatctctcacgtgcccctggtcccattcccatactattctttgctaatcccaaaaaaataaccgtctctagttaatgattttaacaaatcaataggattaaaattttatttgggaaacgtgcagggattgatcatactcacaattcaagctcggacaccatccttaatgcctccatcgtgcgatagtcccacatgtgaagaagtgagtggttcgaaggcagcgatgctattcgtggggttgtaccttgtagctttgggtgtgggagggatcaaaggttcattagcatctcacggagcagaacagtttgatgagagtacacctaaaggtcggaaacaaaggtcaacgttctttaactacttcgtgttttgtcttgcttgtggagcactagttgctgtcacgtttgtagtttggttagaagacaacaaaggatgggaatggggattcggtgtttctaccattgctatcttcgtctctattctcatctttctctctggatcaagattttataggaacaagattccatgtggaagtcctctcaccacaatcttgaaggtttgttttgacctctttagctcttattggagattgacgtgtgccctaagttatgtatatgatttctttattcaggttcttcttgcggcttcggttaagtgctgctcgagtggaagttcaagcaatgcggttgcgagtatgtccgtgagtccctcaaatcattgcgtatcaaaggggaaaaaagaagttgaatcacaaggagaattggaaaagccacgtcaagaagaagctttgcctcctcgggcacaactaactaacagtttgaaagtattaaatggagctgcggatgaaaaacctgtccatagattgttagaatgcacagtccaacaagtggaagatgtgaagattgtcttgaaaatgcttccgatatttgcttgcactatcatgcttaactgttgcttagctcagctctctacattctccgtccaacaagctgcttccatgaacacaaagataggaagcctaaagatacctccagcttccttaccgatcttccccgtcgttttcataatgatcctcgcacctatctacgaccatctcattatcccattcgctagaaaagctaccaagaccgaaacaggagtcactcatctacaaagaatcggagtaggtttagttctttcgatattagcaatggcggttgcagctctagttgagattaaacgaaagggagtggctaaagactccggcttgcttgactcgaaagaaaccttacccgtgactttcctatggatcgcacttcagtatcttttcctagggtcagccgatctattcacactagctggactactagagtatttcttcacggaagcaccttcctcaatgagatctctcgcaacatcgctctcgtgggcttctttggctatggggtattacctaagctcagtgatcgtgtccatagtaaacagcatcacaggaagctcagggaacacaccttggctcagaggaaaaagcataaaccgttacaaactagactacttctattggctaatgtgtgttcttagtgcagctaacttcttgcactacctcttttgggcaatgcgttacaagtatagatcaactggttcaagaagctaaaattggatgggcaacttttgagttttttttttgtttttaattagagcagaaaatgtttttacttgagcggctgttatataagagatgataaatgggggtaagtagtaatgttgtgatcaggtatatattggggtttgaagtttttatcgttggacaagtaatgtacagcgaatgatattaacttgctttaagtctttcttttgttcttgtggtgtacgaaattgagtcaaggttttgatctttgatatattcacaaaagttgatactggaaattctgtgaatacttatttgaattctcagcaagatactaaagaactggaatttgagagaaatgatggataaggaggcccaaggattttttgtcatttgtgtgagaaaacgatggtcacgaggcccaaatatttttgacatggcttggaagataataaggaaacaaagcccatttattgaggttttggtcagtcatgtagtgtggtaagtaaagttataatcaaaacatttcttttgtttttttctttgaagacaaattgattccttacgtctaaacatactacaattgattaatttggattccttaaatctctctagacaaacatcagatatcatgatagtagaggttaagatacttaaaatactatatatttacaaaaaacacttaaaatactatatagaaacgataataaaaaaaaaactctttttttttctgaaacaaaattttctttactaagaaaattttgtttcagaaaaagagtaattatttttttttaaaatcttttttttgttttgttttttgtcgacaaaaaacgatgaaaaagtaatcactcagtttttttttctgaaacaatttttcaaagctagaataaatttctcacaagggatttaaggtgattgtttttgaaaaaaaaatccaaaattatgataaaatattaatgctgaaataaatataaactagaattatttttgtccaaatttttcgtaaataaattttgtaaacagcgattatgactctggcaatttcttaaaaaagaattggataagtactgataaatttgtattctctcaactaaaatctctttttaatagaaataaaagctaaatcccaggaatcccattttagtaccagtcgtggtataaatattaacacttactgattgccgagagacgaaagaggaaaatcccaacaataaagagcaaacgatcttacagctcataatatttcgttaattatcaaattgctaataggtaatttcgcggaatcttcctttgtaatttcctccaactttctctgctttgcttataattgcgtctttgcttcctcctttacctttacgcggcacatagattattctctccaagtgtgttaatttctcttcttcgtaatctaattttgttttgttactgttgatttgtgtctttctgtttcgtggactctttttgactcccatcaattttaggattcttcttcgtgtgtggattttgatttcttcttcttctctggtgggttttggaactgttaggcttttgggtattttgttgaattccttagggttttgtagtaagattttgataattattgaatcgtttagaacaagagtcaactttttaaagtcattttatagaatctgagtctactagtcgttgaataaatattcttaaagaaatgatttttataatcttcttctcgtcgactttatttattatttagaatcttgtatttgtttttataacccataatctagaatttgatgatttttcaggtataaagttttgtaatttacttttcaggagaaaaaaatgggtcaagctttgggttgtattcaagttgatcagtcgaatgtagcaatcaaagagacttttgggaaattcgacgaagttcttgagccgggttgtcactgtttgccatggtgtttgggaagtcaagtcgctggtcacctttctttacgtgttcaacagctcgatgttcgctgcgagacaaagactaaggtctcttgacacttcctcttgaatcaataccttactcgttctgtgtcattgaaggttgtaatggttttgggttactttgttgtttaggataatgtgtttgtcacggttgttgcttccattcaataccgtgccttagcggagagtgctcaagatgctttttacaagctcagcaacacgaggaatcagattcaagcttatgtctttgatggtttgtttcaatatccttcctttttggcttcttgatgttattgtgtttgccttaactaatcgatccaccatttttgcatagtgatccgagcaagtgtacctaagctggatctagactctacctttgagcaaaagaatgacattgcaaaaaccgttgagactgagctcgaaaaggtaaactactttccagccatctccttgagcaataattttgaaatttgtgcaaaaaattattatacataggttaagactctaactgctgttgtgtatataataggctatgtcgcattacgggtatgagattgttcagacactgattgtggatatcgagcctgatgtgcacgtcaagagggcaatgaatgagatcaatgctggtacgtttaaatcttgctatagaagttttcgacttttgtttgttgagaatctcacaatgttctgttctgtttctggtgtaaacacagcttctagaatgagagaggcagcgagtgagaaagctgaggcagagaagattctgcagatcaagcgtgctgagggagaagctgaatcgaaatacctttcaggtatgggtatagcccgtcagagacaagccattgtggacggtctgagaaacagcgtcctcgccttctccgagtctgttccaggaacatcttccaaagacgtgatggatatggttcttgtgactcagtactttgacacattgaaggaaattggtgcttcttcgaagtcaaactcggtgttcataccgcacggtccaggcgctgttagggacattgcttcacagatcagggatggtcttcttcagggtaactctgctgctgagtagagaaatgtctcaaagtacaaaaaggctttttcagagttttagagttgtgttactacttgctactcagtttatcttttagcggttggctctatatgggttcttaaatttcttatcgtttctctcttctaggcttgtggacttgatccattttcttgttttatgggtttgtggatagagtttgggcttgaaaaatatttgtgttattttgggttttaatgtcgttaactcgttattaatgtttaaacagtggttaaagaatttgttaacgagaatcctgattttactgaataacaaccagattgttaacatttaataaacatttcaatttaataaaaagaagcaaacaataaaataacgttataagaataaaaggaaaacaattaacttgataaaacaaaaagtagctactttttaaatctctacgataccaaaccactgagatctgtgcttcactatttttcagaaataaacgatttcacgatcttaacgttccaaactcatcgatcagccgtcagatggtaaatcagacaaaaaatagaaaacacaaaatctgagctactaaatttccttgtatcttgtatttagtaagattgtataataattaatatattaatatcgttgctcaaaaaaaaaaaaaaaaaaataaataatatattaatattttagtctaccgacgtggcagagaacgcggaaggatctaagctgacgtggcgttatagtttgataataacaagtccacgcattattcgaaataaaaaaagatcttttcctttcaccaaaccaaaagttatcatatctctctgccaaatactattttctcaaaaaataaaaataattccaacgactcttattaacctcttcttcagtaacattcgctgctacaaaatatcttcttcttctttcttctgctctctctctctctctcgccatgtccactgttcccattgagtctcttctccaccattcttatcttcgtcacaactcaaaagtcaatcgcggaaatagaagcttcatacctatctcgttgaatctccgttctcatttcacttctaacaaactactacactcaattggaaaaagtgtcggtgttagctcgatgaacaaaagtcccgtcgccattcgtgctacctcatcggatactgccgtcgtggaaaccgctcaatcggatgatgtcatcttcaaggaaattttccctgttcagcgaatcgaaaaggttttctcaatcgccgtacacagtcacatttagcggaaattgattgaatatagttcctatgttgttgttagttaaatctaataaacacattgattttgtgtatgtgttttgctgaatttaatggttttgatttcgatttttgggaatgataggcagaaggaaagatttatgttcgattaaaggaagtgaaggagaagaattgggagctgagtgttggatgtagtatacctggaaaatggattttgcattggggagtttcatatgtgggtgatactggcaggtcctttcctcatttacctcttttttttggttgtctcatttacattattgagaaaattttattcccttgatggtctctacattttcgattcgatagtgaatgggatcaacctccggaagatatgagacctcctggctcaattgccattaaggtattactctggtgtcttttttcccttttggtttatatctactttggatagttgtaatatgttgttatgtggtgtatcaggactatgccatagagacacctttgaagaagttatctgaaggagattctttttttgaagttgctattaatctaaatctggagagttctgtagcagctctcaattttgttttgaaggttctgctgcttttaacctttgtaacaaagttgattgttggtttggctttagttgtgcatttatttgggactgtttgtgttccaggacgaagaaactggggcgtggtatcagcacaaagggagagactttaaggttcctcttgtagacgatgttcctgataatggaaatttgatcggagctaagaaaggatttggtaaatggccttttttttatatatatatatttgtcaatagcttctactattgtccggactacagattttgcattcctatagttaggcattctttcacctcctcattcttttttaacgatgtataatgacggaagttagtattgcaacagactttctttgaatctttaaactgattaaggcttgctttctcttggatctgtaggtgcccttgggcagctttcaaacatccctctcaaacaagataagtccagtgcagagactgattctattgaagaaagaaaaggtcttcaagagttttacgaggagatgccaataagtaaacgtgttgccgatgataactcagtcagtgtcactgcaaggaaatgccctgaaacatctaagaacattgtatcaattgaaaccgatttaccgggtgacgttactgtccactggggagtttgcaaaaacggcactaagaaatgggaaattccatctgaaccttaccctgaagagacatctttgtttaagaacaaggcattacgcactcgtttacaggtacatgtagaagtaggcaagagtcacatgttcagatttgaaaatttggcaagaatcacttgtgttgtgtctctgtaattttagtctgtgagattcaaaatcagtttttggttagcacctggcgtattcgcaattgtccaagcaatttgtaggttgtgcaggcctggtttttaattaagcattagaatggttagcaacccaatgcattcggttcttctgttttttgcgcaccctgatagacatttccttcatacttttaccacatgatgccgtcactatgtctttgctgctgcttccatatatcttttgggcacctagagatcattttcatgttggcacctaaatattttgtctagcttacctattagaatattttctgtgtctatcagtgacattacctaagtgtttatgcatatgaacattctgcagcgaaaagacgatggaaatggatcgtttggattattctctctggatggaaagcttgaagggttatgctttgttcttaagttaaatgaaaatacttggctaaattataggggggaagacttctatgtccctttccttacttcaagtagctcgcccgttgaaactgaagctgcccaagtgagtaaacccaaacgaaaaacagataaagaagtgtctgctagtggatttactaaagaaatcatcacggagataaggaacttggcaattgacatttcctctcataagaatcagaagacaaacgtcaaagaagtgcaggaaaacattctacaagaaattgagaaactggctgcggaggcatatagcatatttagaagcacaactccagctttttccgaggaaggtgttttagaagcagaagctgacaagcctgacattaaaatctcctcaggaaccggctcgggatttgagatattatgccaaggtttcaactgggagtccaataaatctgggagatggtacttggaacttcaagaaaaagccgatgagttagcttcacttggattcactgttctgtggttacctccaccgacagaatctgtgtcacctgaagggtacatgcctaaagacctgtataacttgaattccaggtgagttccgcatttttatcagactgtcttttgtagcttagttgcttaaacttcgttatggattgttgaatcataaagtagaattctggttaatgttgtttttgttgccttaaatgcatgatcagccagcagtggaaatgttaattctcttaggagattaacaatacttatgcatttacatgatatcatgtatctgaagtacatgtttccccctattttttgttgcaaactttcagatatggaacaattgatgagctaaaagatacagtgaagaaatttcacaaggtcgggatcaaagttttaggcgatgctgttctgaatcaccgctgtgcacacttcaaaaatcaaaatggtgtatggaatctatttggaggacgtctaaactgggacgatagggcagtagttgcagatgaccctcatttccaggtattactttcctttctttggatttaaaataaacagctatagaacgaaaacgaggcaaattttttgatagagaatgtgctttttgctgttatctgctgccgtattatgaacttggactagtgtttttgagagaaataaggtgcatatgatctctattacccttgatgatacaatcaactaattcattgattcagggtagaggaaacaagagcagtggagataatttccatgctgctccaaacatagatcactcgcaagactttgttaggaaggatatcaaggaatggctatgctggatgatgttagttcccctgttatttgtttaatatcttcttctgattagtttggtgtctgatttctttctctattttgatttcacctgcagggaagaagttgggtatgatggatggaggcttgactttgtaagagggttctggggaggttatgtgaaagactatatggatgctagcaaaccgtactttgcggttggtgaatattgggattcgttaagttacacgtacggagaaatggactacaatcaagacgcacatcgtcaaagaatagttgactggattaatgcaactagtggagctgctggtgcatttgatgtcactaccaaaggaattcttcatacggtactaataatatcgtatcttgttacgtttgatacaacatttccttttggtatataatatctggtagctttctgtgtgtaggcgcttcaaaaatgtgaatattggagactctcagacccaaaagggaagcctccaggtgtagttggttggtggccttctcgtgctgtaacattcatcgagaatcatgacactggctctacacaggttttatttctcagcattctaagtacctcaagtttctgttctctataaataaaccgtcttaacaatttcttccgcttttcttaaagggtcattggagatttccggaggggaaggaaatgcaaggatatgcttacatcctaactcatccaggaacaccagcggtcttcttcgaccatatcttctcggattatcattccgagattgctgcacttctctctctcaggaacagacagaaactccactgtcggagtgaggtaaagtagtaatcaagaacttacaatctttatacaaaatttcgacgggtcttaaaaccagcctcctttgtcttccttgcttttgtgaattataaaggtgaatatagacaagagtgagagagatgtgtatgcggctataatagatgaaaaggttgcaatgaagatcggaccagggcattatgaaccaccaaacggatcgcaaaactggtctgtagccgttgaaggcagagactacaaggtgtgggaaacatcttaagaagaaggttcccaatttttatgtgtatctagtagtaaataaaattgttcctggaggatatattatttcagggaataagattacctggaaatgttatatttagagtggaattaaaaccagatctaagatttgtcccacttttttcaatgctgagagaatattcatattgttgtattggatgcttgtaaagtgtatgcatatatatatgaataataatatatctatttccaaaattccaaaacttctgtttagtgacatcatacttaatgaaaaaattgtttgttttggggttttcaaacattcatgatattttcttgttctccgatcaagctcaaattcggagacatcactcatgatttaatggaatgagtggaacgaacaacttttccaatctaccggttaacgaaacattttagatatgttgcagttatgggagaaaaatgttgtatcattatttcataaatcccactagttattcttaatattttatgatacgaaattgaaaagaacatgtatcccagagaagagatccatccatgtttaaatgtgagtagcaattttaatcagttttatcctactttacatacacacatataaccttgatcgatgaagcctatacaagaaccaccgggataaccttgagcatgacagtaatcaagacattttccatctttgtccatgccggttggatctgagcatttgtttccggtgaaaattggtgattctatacactctgtcaatttacgttacaaaagattaacagaattattagttatatgaaaaagtaacaaatgatattttcggtaaatcagacaaactcaccaagtatattttataaggagtttcagataaaataaataaatttagctatatatatcaaattgtaaggttatttatagggaaattaatagctagatgtcaaagaaatcgctcacctccggctaagagaatacatagacaaagaaccaagaaaaatgagactttgttagatgccattttcttatttgaagtttttttttttcacaaactacaaaatatatgaatttagataaggaaggagactttgttagaacccgaatatataagtcaaagtatatattttgtattatcaattataatgaattttcaaatttatggatattttctattaaaaacagtaatatttttacagcaaatagaaataaatcttacggtaagattcttaccttttaataaaaatggcattttggtattttcataaatgtgtattgaaatatgtttcaatcattcttaaaattttagatattagttttggccaaggatttctataatgtaaattgaaatatctatatattattcttaaatatgtttatgttatcttggtagtctaatttattcttaaatatatttggaaacaagtctatagggttttgcaagttctccttgtagtgtataatttgaacacaaactcttagggtaataagtattttcataaatagcaccggttattctcatattacaataagaaattgagaagaacaagtatatatccaaaagaagagttacatgtataaatatgagcaaacatttaaatcaataagatgtttgtttatcctacataacactcacacatatagtgattggtgtagccttgacaagaacccccgagaaaaccttgttcattacagtaaatatagcatttcgctttttggtctacaccgtttggatcttcgcattttcttccccttgggttttgtgcttctccaaactctatcagtttatgttaaaaacaaaattaacgattttatttgctaaacaatatttaataaataaatgatatttttaatgaatcacgcgaacaaacttaatttggataatatatattataaaataattccaactcaaaataaataactcaaaagaatatatatgatattagtaaagctatttaaagagaaacatatgtcaaagacattgattacctgctgttgagagaacacatagaaaaagaataaagatgaatgagactttgttagatgccattttcttatctgagttttattttttcttacaaatatgtcaatttacagtctttgatagaccccaaatatatatatatatatggtctagaagagtttattcaactatggaattttaattcatttccaattttatattagatatttttctaacaattaaagacatgtttgcgacaattagaaataaatcttaaaatgacgtttttggcaaaatattagcatacatataaaggaaagtaaaattactttagtacattgttctgtcatctttgaatgtttgaagtgtgcatgaaccatttaagtcgatctgaaccataacatctatattttcttaaagacaaacatatattgagtttttgttgacccatatatatcttgactcattttaacacccataaatttaccttttgataaaaagaaaaaaggaaaaagaaataatatctaaatgacattgttggtattttgataaattcgtaatgaaatatgtttctacttttcttaagttttagatattattttggcccatgtatttctaattattttttttcattttttttgtatctatcaaaaatattgtaagtctttgatttgatgaatttaagaaaaatagaatcataatccatttgggacatacacaaaaataattgttggatttgatcaaaataattcatccattattagttgtaaaatcgcacattttttttgtgtgtgtgtgtttagagttcaaagttcaaaccatgagataagtaaaagtcccatcgaatatgaaaattaacaacgaaatgccatagtcccctaacaaaattttacggtacattcacacataacacggttagaaagtatcagtaatcgaaaatagataaacggaggccaaatctctcttggtcaaaaatggcaaagcattcattaagctgcaaaacctttgtttagtactgatatcagttcaatactcgatctgtttcgttataaatgttgttttgagggtttccacattatttaagaaatcaaatataatgtatattttgtcctctaaaatgcatttattaaatgttttataaggaataaagtaaataaataaatagggctaaacgagtaaagatttaactaattttacctagatttagttaaacatcatttaaactggagaaaaaaatagtagaatataagagcatcattgttggtaagttcttagattagttcttaggattttctttttgtcattaattactaagaacatctcattttaactcttatataagagacattttaaatgacattttgtctcttatataaaagttaaaatgagatgttcttatcctataaactaatctaagaacttacaaagaaggatgctctaaaccaaccaccatttataagagtatagctagcgtttaatgaaaatagacaggtgaacttcgatcaactctagttcatagatgtgacgtgtttctctctctgtttagttatgtaccctaaatcttttctagtagactaggtaggtgtgacgatactcataattaatatgtgttggtttagttggttaaggactccgttttattattattatttatggtccaacacaagtatcacttcttggtcacactgcagtcatcgtctgaacaaaactattttacccaaggacgaaagagaacgagacctttaagaaaaagacgtcggatgaattgtaagtcttttctttcacttttatttttataattcctgtagaaaaaacaaccttcaaacaattagtcagtaagttgttggtttagcttttgagccatttgatcgataaaagctttcacaacatttatatttgttaaagagcttttacaacatttcacacattgagaaatttctgaaacacaagatatataagtaaagaaagtctttggtaggttttgagcttaaaacatatatcctctgtataacatatttttttcatataaaacatttctaatatttgtgcgagaattcttcaaatttattgtcaaacgaatctgtcatcttttgaacgataaacatattttttgtttatcctctgtaacaactaatctctgttttttattttttcattaccaaccagtcagagcaatgttactgattcgaacagcgacggtcgctcttcttctaatcgcgtttcttgaaaacgctgcgtggtgctgcaatgatgcttgtaagtttggttttcttacgtgaagatatcaacttttatgaaacctaggtttacttgagtttttttgtaagggagtttcttgtgttgcaggttttgaacattctttctcaatatgggattccatcaggtgtttcgggctctctcggggttcatcgacttgttgaggctctgaaacacgctttcgcagttagaatgaaccttggggatccggattttgtcgatgtttctaaggttatttctgatatgttgtctacaaattttgcacaaggcttgaagaaaaagataaacgacaacaaaacctttgatccaaattattacggtggcaggtaagttatttgatctgttaaaacccgcagatttcgtttgtcaaatcttgattttatcggtctttcgttatccatttcgtaggtgggatcagattaacgaccatgggacaagccatttatcaatcatagatagcgagaggaatgttgtttcactgactagtacaataaacagttactttggggcattgatgttatctccaagcaccggaattgttctgaacaacgaaatggatgatttctcaatccccatgaaatccagcagtaacctaactgtgccaccaccggcaccggccaatttcattcgtcctgggaaacgacctctgtcttctatgacacccaccattgtactcaaggtaagggaaattttttttgattacttgtgatacacgaaactcgtaatttactccaaaagatgttttttttaatgcaggatggtaaagtgaaagcctccgtgggtgcgagcggaggactgtacatcatcgctgggacaacagaagtttttctgaattatttcttcctcaagatggatcctctttcttccgttttggctccaagaatctaccatcaggtttttcgtttttttatttttccttagaaactttctcgttctctactcattcctaaaatatgctttttgtaataattttcattttcagctgataccaaacatagtttcgtatgaaaactagacgacagtgttcagtgatcatttcgagattcctaaagagacaagagttgtgttggagaagaaaggtcatgtcctaacgcctaacgattgttcagttcatagttcaagaatctggtgcaagttctggtggaatgagtgaccttgtggcagtaagtgatccaagaaagggagggttcccttcaggatactgagatcgggtatatattaatataactagttacaaatcgaacatggcttccaaaaattaaaatcagtacagcactggttaaccaaacattttcaatatgttgcaaattattaataaccttacatttataggtttttgtgttccacattatttcataaatcccactatatatgataagaaattgacaagagatacatattcaaccatgagatgtattcttatcctacatagcattcacacatataatgatttttgtaaccttgacaagaaccacccatataattttgattaaggcagtaaatattacatttatcttctttgtcgtggccgtttggatctgggcattttattcctgttagaatttgtgcttctccaaactctatcaatttatgaaaaaataaaaattaatggttttatttgctaaataaaatgataacaaaaatattttgtatgaatcaggcaaataaaacaactttagaagtaaaatgtatatcttgtccaaacaaaaaaagaagttaaatgtatattatgattaattcaagataaagattaataaactaaatcttaattaacagaaattagttataaataaaattgaaaagttatcaaaaggaaaatgtatgtcaaagatataaattacctgctgttgagagaacacaaaggcaaagaaccaagaagaatgagactttgttagacgccatttatcttctttcttttctttttttttgatgaagttttttccttagaaaatatatatgaatttaaacaaggagagtttgtcagcccccaaatatatatgtttagaagagtttcttgggttatacattgttgatacattttcaaatctttatagatattttccttagagaaatagggatatttttacagcaaatagaaatatctgatttgctttgattgttaaacaaaaaaatggaaaaatatatctaaaagtaacatttttggccaagtattaccataatttttgcatgactgtcttgtcatgtttgactatttgaagtgtgcacaaacctttggttaatgggagtcctgaaatttgtattttcctaaagaagggcatacattgaatctttgaatgtgaagcatttccatgttgtcatttgattaggccacacagaaaaaaaaaatatcttaacttacagtaaaaaaaatttctcccttttaaatatcccaaacatgaaaaagtaatatctctacactctaacataaatttcccaaaaataaaaatagagaatctgaggaaaaaactgccgtgatgttatcaaaatgaaaaaagatgaataaatcagtaactatatctagggtagaaaagtaattatttgtgttcagaccatatgaatatgttcattcaaaagtataaagcccatcaagtaaaagataacaacataatgcgacagttcattaacaaaaacatacggcccatcaacacttaacaacaatcgagatacatggagccaactctttcttggtcaaagtccgaatcattcatcaagctgcaccaaccttgccaatgagcgactttcggatgtacacacattcaataaaacaccttttaaacaagatgtaatttttttctttgaattcttgtgacgacaaatgagaactaaagagccttgaaataaaaaaaaattgtgcttttccgcatcatttttgataatttaagattcaacccgtccgggttggtccgttcgtgtttcgaccaatattataagccgatcggatccgtttttgaaagaacacttgtgacttgtgagattaaattttttggtaaagtgtgacttgcgagatgatagtaatatgcaacaatgtcacaaaaataaaaataaaagtaatatgcaacattaaataaccaaaatttgacttagccattacgatacagtttaaattatgcgatggattctggagcacgatgtaagagatcattgactataatatcattattgtgtaataaaaaattattttttgcatttttaaaattataaatatttcaactatctagattattataataccactagattggaatgacatcgtatatatggtagaaataaaaccggatcctgcgctcctttctctccttattattggtcgacttcaaggccacgaaatcgaatattattaatttacaatgacatttcggatataaatttaaatgtttaatctaaaaagtatactttatttgaaataggataatttcagaagaatctttaattataaaatccttatatatgtctgtattagtgatttagctgctcgttacgaatatattaaaacaataaataaaattacttccatagacaaatgattcaggtttaagacgagatttgacgaaatcgtctaacgatgatggagtataagttcaaaataaaagtttgtgtggagctataagaaatatccccaaacaatgtaaattgtattcggaatcctaattgtctcagttttagttgaaaatcttttttttttctggttaacacactaaaagaagcaaatgtagtttctaaggaagtccatcctagttaaaatcttgaagccgacggtgtaaacccactcggattgtggaagatgaattttaggagtcgaacaagagaccagtctggagaaactttgagttgcatgatatagcttgttataattgtattctatgattgaaaaaagtactgctcggtttcttatgatctcattgatgcgtgtgaagatgaaaaaagctctgtttgatcttcaccaaaaagaaaagttattcgataaagtattcaactaatataaaatgaccattcgttgtttgtattatcattcaataaagcagcctttctaatattgtactattctttaataaaccccttaacttacgtttccaaatagaaagttcttgcattagtcataaattaacatttcataaacttttcattatgaaattcttataattttataacattataaaattcatgcagtgtctattaattagcaatttaagactaacataaacttaatcaactctgccaactggtcaacgtaattaagtagctgcagatcgatgatgtgtcattttttcattggatcagagaacaaaatgcgttttacagctgaaagtttcttttacaaaatgcactcatttcatgcggtgtccgttagtgattaacgctggataaatagattgctttattcaatttgaaaaagatcaaaatatagcacataaataaaaaaaattagaatatttgttccgatcataaatttatgcgtatacagtatatgtgtatttttataggattaaagatacatataaatttcttatatttaatagatatcgttaaatgttaaagaaaatttatctaaaaactagctagtaaacatacaaatatatcacaaaaaatacattcacccctgaactgcctataaagaatgattgtggattaatttttgacatatattaggtctaagaaaaaagagagaaaatattgttttttttctctctcagcttttgtttcccatgcatacagctttatgttagcgaagaactagtatgatctggtactccggtactccggtacagacgaaagaaagaaagaaaaaacttgttttagttgcctcaatgtcaactactatgctttaattatgatgccaattaacaaaaaaaaaacgaaatattccgaagtagtgttcagaccagatccatctggattgcaatacaatttgatattatttatatgattggcattatcttattatataatgctgagtcgtctggttgagattattcaagaatagagacgaagctggtaacatggtggtggtgattaccattataaacaatatttttagtctgtatatcttcttattaaaatgcgaagtcaaagtctgttggctttgggtcccttcctataaaaacctagttaggcaaaagaaaacgacaataattttttttttgatgtaaagaagaaaaacaaaaagagcagatccagttgatctcaagatcgcatctgaatcatataatagcatgatcaaagaggagaccgtttcatacttccaaactttcgatggtgttatggcagaatctgacaaggtaaaacaaaacactatttctcgatttaaccgtttaaaccacaaatttctctaattcttgttttattttcaatctccttctggtgtttcaatcggttagaattaatctcatgatcatatgattctgttatatatttacatatagttaccatataattcttatgtctgaaattaatacagttttactgcatctgataaaagtcaacttgcttgttcggaaatggtctcgagtatcgaaagttcattattttttttgggacggttatttaatgctcaaggataccaagattttccggtatttagaaaacttcggatgaaaacatttataattaagatccgctctaattaatataggtcggatcgatccattttttttctttttttctttattggcattcgatcatgttcacttttataatactatttactttgtgtgtattgagaactatttatcgtagaagtttagaagataggtccaaacagtttttagataaaaagtgaatataaatgtgtcttggatattacaggaagaggagcttgatgcaacaaaagcaaaggtggagaaagttcgggaagaaaatgagaaattaaagctcttactctctacgattcttaataattacaactctcttcaaatgcaagtctctaaagttctcggacaacaacaaggagcttcgtctatggagctagaccacattgatcgtcaagatgaaaataacgactatgatgtggatatatcacttaggcttggaagatcagagcaaaagatctctaaaaaggaggaaaataaggtggacaagatttctactaagaacgtagaggagtcaaaagataaaagatctgcactgggttttggatttcagattcaaagctatgaagcctcgaaactagatgatctttgtaggcaggttaagcttgcaaacgctgaaaataaatgtgtatcttcgaggaaagatgtcaaatcagttagaaatgaaaaccatcaagatgttttggaggagcatgaacaaacaggtttgaagaaaactagggtttgtgttaaagcatcatgtgaagacccatcagtacgtaccatcaaaaccatacattacatatatgtgtttatttaccatttcacatctaatttaattatttgatcatatacacgttacatgaatatatatagataaacgacggttgccagtggaggaaatatggtcaaaagactgcgaaaaccaatcctctcccacgagcctattaccgttgctccatgtcgtcaaattgtcccgttagaaaacaggtataatacattctataatttctcaatccaaatatctgtttattaacaattggttttgagtaaaaacttttaaaacgaatgtctataggtgcaaagatgtggagaagaagaaacctccgcttttatgacaacgtacgaaggaaaccatgaccatcctctccccatggaagcaagccacatggcagctggaacttccgcggctgcctccttattacaatctggctcctcctcttcctcctcctccacctcagcgagtctaagctatttcttcccttttcaccacttctctatctccaccactaactcgcacccgactgtaacattggacctcacacgaccaaactatcccaatcagttaccagacgactaccctctatcgtcctcctctttcagtctcaacttttcctctccagatcctccacctccatcatcgcatgaccacaccttgaactttagtggcttgcgaacacaagctccgttgagtacagattcattattggcccgttatcgaacgagactttccggacagcaataagccagtaactgtatcggtatagctagacacaagtctagaaagtaactgatttccgttttctttgtcattcatttgtttttcagcctctgaaagagagatctggttttggcatgatatgcaaaatgcttatatacttgtagatatccaaatgtttaaattagtggattacctatcatatcatggattatatatgtatatgaaggttttgtaaattaatggtctacacaaatttgatacaccaaatatttttttatgcttataaaaattttaaatacaatgttaattttttttgttggtgaattaagtaagtatgactatgatgacacaatgatatctaaaatggaaggtggttttcatgcagattgacaaaatctccctctttcacttttgcaaaattgtttgatttttacaaaataaactttagttagcatcacataaaatagtgggttatttgacaaattatcaacacaacgtattattatttgaaatcacatacgtattgtttactaatttgattattattattttttgctacagacatttactaatttgatggtcaaaattgtagtcaccattaaaattatttacataaaagaattgattattttacttccctcaattatcaaatataaatttgtgatgaatttgaccgaaatgaagatgtctgaattgtttgagccacctaaatgtttagatggtcgattcttaaaaaggaaagaaaacaaaatgaccaaaagaaagaaaacgtatgaaactatgatccatcagatattacttttaaatcaatcttgggctcaggcccgttactaccgttttctatcttagaattcggcccatccacgtcagcgactccggttataacgctgttaaactcttttgacacacgaccacttattataacgtcacgtgtcaatgcacttcatcaggacgcgcgtaaccgccagaaaagcgaaaccaaaggtccatctccgacacgttgcttatccgaccacactcaccactgttctaaattctctcttttttttttccttaaccaaaaaagctctctttttttcttctgggtttcatcgtttccaatctaaaatcatcgtagatttgtttgaaattcttcaaattgagccggtatcaagacatggcgggaagtgaagcggtagaagataaggagataaaatcggcggtttcaagctgtgaagcgtatttcgagaaagtacaatcaaggaagaatctacccaaatctcttcaagaaaccctaaactctgctttcgccggaatcccagtctcctccttccctcaagtccccggcggcagaggtaaaaattagaaagatcccatttttttcgattcctccaaatttcctgatttctcgtttaaagtttgagacttggcaatggtttagattcaattagtgttttgtttgatcgtagtgatagagattcaagcggaaacacctgtatcagaagcagtaaagatcttatcagatagcaagattctatcagctcctgtgattaacacagatcacgagagttctttagattggagagaaagatatttaggaatcattgactactcttcaatcatcttatgggtgctagagagtgctgaactcgctgcaatcgcgttgtccgctacgtcagcaactgctgctggtgttggtgctggagctgttggagctcttggtgttgcagcgctcgggatgaccggtccggttgctgctgcggggctagccgcagctgcggttggagccgcggttgctggtggtgttgcagctgaacgtgggattggaaaagatgctccaactgctgctgataagttggggaaagatttctatgaagttattcttcaagaagagccttttaaatcaaccactgtaagttttttaacagaacattaagttatttgtgttgtgatggtcctgattgatcatggatatatgtttatgttgtcaggttagaacaatacttaagtcgtttagatgggctccttttcttccggtttcaacagagagttcgatgttgagtgttatgttgttactctcgaaatatcggttaagaaatgtgccggttattaaaacaggagaaccggatatcaagaactacgttactcaatctgcagttgttcatggtcttgaaggttgcaaaggtagagattggtttgatcacatttccgctctcccgatttctgatctcggcctcccgtttatgtcacccaatgaggtaataaaataaactttaagaagtcatgacattaggctcgtaaaccggtgaaattgaacatgttggtttcaggttattagcattgagagtgaggaacttatccttgaagcatttaaaaggatgagagacaacaacattggtggtctccctgtagttgaagggttgaataagaagattgttggtaacattagcatgagagacattagatatttgcttttacaacctgaagtcttttccaatttcaggtttatttttactcacttgtttctcattacaacttctctggtaacaatgatgactgaatgatctctttgttgatgataaagacaactcacggtgaagagtttcgcgacaaagattgctacagcgggagaggaatacggtttagcgattcctgcaataacttgtaggcctgattcgactttagggagtgttataaacagtttggcttcgaggtcggtgcatcgggtttatgtagcggctggagatgagaatgagctttatggggttataacactgagggatgtgatctcttgtttcgtatcagaacctccaaattactttgagaactgtctcggtttctcggttaaggaaatgcttaaccgatgatctcttgtttctcagcttttttttggctttgttgtttgttctttcttggtttagatttctgaagttgttgtctttatatctaatttgtaaccaaccattttgagttttaaagttctatcattaacgacatcttaggattgaaaatatatatgtactgtaatgattggataaaaaattttctgttttatggattgttcaatttcatatttgtgtttgtgtaagtctcgccaattcaatgcagctgattaagttcaacttacagggaagccaaactaagagtttaatcagcttgaaacaaattgtataactaacaaatgaaatgactcactcatgaatgatagatcaataaccaaccacattacttatcttcttcatgaaaaggctcataactcacctcaaccgttgactacaccgctcgataattaatatagcctgtgggtgccaagatgtcacctagagtccccccaaacacttcagtgttcatcagattgattgatcgatcgatagatgataacaaagtatgaacaatgaagcgtttaagggaactcaaggggacatttgactttacatgttatgtctcttttgcaaatgcttcttctcttactcaactgaccttagcgacaacccaaactgcatatttatagtctatagatacttgccaatggaattgtttttaaaggagggaccatagattctatattcttcattgaatggcaaaacatgcgggaaatatgaggatgaaccaagtcggaattttggtaataaggagccaagataatatttaatattcccatcagtgtgctacataagcacattcttcacaagatctttcgtcccgcagatcttattctactcttttttccgatgtaaaattgatttagaaacccaatataataaagtataaaagtatcttaaaaatctcactatagtaaaactaaacgaagaaaattttccctaaacatggcctttaacgcttacatatatctgcattttcaaacaaggttttctctgtccgtcttatcaattagtttacgtaaggttatgttaggatgaaatagaaacatatttttactttggtgaaaaatataatcgcgaaaactaaattgtctttttctgtctataaataatacatcataaatttgaagtagcatgcagtagtgtatacacaaaagaagcaaaaaaaacaaaggaaaaaaaatgatatgcatgtaaaaaagcaaaaacaaaatcatatgttcatttacatgtatatgagtgtacattcattggcatctatgcgtttatagaaacgtctttcttatcttgcaaaaagctgaaaggaaaaagaatttatgcacttttcttaaaaaaattgattccctcacctaaagcccttaacctgaattcacgtctaagttcacaatgcttccaattgtatatataaaacgccagtccctccattctttttcaaaccctaacactcttataaaccgattcgccaaaatgtatctacaatatattgataatgtaatatctatatattcaaacaatcgtcgtgttggtcggatgttttctagagttcctctgagcacttcattggagatacaattttttataaaatagttttctactgaagtgtttgggggaactcccgggctgattcggtattttaaattcagtagactagctagctgagtttgatttagtgttgcataaggtaagggatcagttaatatagaatattgaattaatttcatgttgctaaaatgcttatatttgttctttttctcaggttcaattccagtctattactgctaccttaatcactatattgagtattgtaaagaggattatcaatatgagacttgggttgttaaaaaaaaaaaggttgatgttgagaagatccgacatgtttaaataactagttcctccgtttcattacatagaatgtttttttcattatatttgatatttttcaaatttgtatgtaaattttaaatttattttaccctttaagtctttggacaatacaaatgatcacaagtgttctttaaaaacgcatgtgtcaagttaaaggcattttttgggaaataatttgtacatcatatccaaaatatgtccaaagaaaactgatgtttccaagtctcgaacgtaccagcttgtaggaataattggatatgatgatgagtttgaccacagaggtatgtcctcaaagatgatgggtggagactggagagagatgtgccctggtggttaaagaaaatccagatctccttggcataattacaatcaaagaacaaatgatatatggcttcctcactaattcaacaaaagtatacagtccagcttggttttgcttgataaatttgatgagagtaaactttatttagaaagaattataatagactctcataaaaaaacttgtacaagatacatttttctatatagaaatgagattaatctaattttctaatgtaaggtaaagataaaagtaaataatatatttagaaataattgtaaatattcataaactaagatatgacaatcttctagatccttctagatcttcatgattttcatagtcttggacaatcatctcgaccgtccatctccagttctcccaataggtataaaggaaatcatgctttcaagagcgaaaggatcatgtgacgtcccctaggcaacctccaagaaccttgatgaacaacttgggatacataagcaagaaaaaagaatacctgaccctcgtggacttgcgtcacccataaggtttgattaatatggcccaagagagttccaatttttgtgtctgaacagagcctcagaaccacataccagctgataggcatgaactatttctatatccagctcccacccacaaaaatcagcttctcaaagtctttcagcttttatataaaaacattaattttatattttaatatattttatatgtattttttggtttgaggctttaacatgtgcattgtttattctgaggtattttcctttatattgagtgttgaactcatttgttgtagatgtaactttctcagagagatgaacctttttttttttaactcgtaagattctgatcatacaaggaaagagattgtttagctaaagaatcagccaccatacaaggaaagatgaacttattttctattttaaagcataccgttgtttaagtttggttaattcattctagacagaccaaattttggtgttaaacctacttctttttggctggatcgaaccatgcattagttctattgccggtaagcaaaaatatccaagactagtgtagtgttgtaggacaacattagaggtgaatgaaattttatatgaaaattatatatttacttgaaaatatatttcgaatgtttaaaaataagttctgaatgataaagaagttaaggaatcccacttttttaatgcgtaaaaggtatcatatgttgatatactgaagaacaaagggacatgtgactcttgccttccttacttatatgtatgtccaatagccaccatatatattttgaagctttttcattcttctctttttcgtggaatttaagacaagggccatcaaattttgattcttatcaaaacgtctgcacattttatattaccgaagatgaacctggtcgatgttttggacctaattaaaagacattgaaattaagaataacttgtgccatgtgttaaacaagttgctcgatatattctatgtttcattagcacacactagggattggaaaaaactacattttaaaatggaggcattacccctaattacaaaaaaaaaaacacaagttataaactccggcattagtaatttaaccttttgtttaaaaaaccgtttgagtgagttaaacaagttgtggactcgaggctcagcgatagaatgtggattactcacaagaatatctacttgatgtggtttcgacctgatgaaactatatattagcactaataatcacaactaatggtatgtatgccactcatttaatagttgactgataatataaaccaatctagattcgaccacccagagatcttgtatagatgtacgtatgttttgtagaatcaaattttctgtctcgtgaagagacagaaggaaaagaagtactaattctcttgtcacaactcttaaacccaagttcacgtccaggttcaaacactctcccctcacactaacgtacatgagattctttagttctcgctataaattagaatgtcacccatcctatcttcctcaaacaaaaatagatctaagatcttatatacctacattctaaccatacaagaaatatttatgttcatggtggtaactagcaacaacacaataataattcgactagatgtcctctagagttctcctgaacacttcattggaaatttgttattcagtaagctaacagttaattccactgaagtgtttgggggaactcccgatgtcatttggtgatgccaagccatgtatgtaaaatggtaactttatactctctctactaccaactatattgttttgaatatacttttctttttgttttaattattaatttgattaaacgatccacaaaaatgagtgatcggaaaaattcgctctaacatcggaatggttagaaaaatgatcggaaaagatgaaaatcacaaaacaactcaaattaacaaattacaggttaagaggatcgaggttgtatatactttttagtttgtataaacgattgtattatctttaaactcaatttaaagcacacatacattttgtttataaacatgaaacaaaataatattaattaaaataaatctttaactttctaatgaaaagattaatctctagttttattacattttttggatgtttagaaaagctatggacttttgatcctcataatcttaagtaacctcttatcaattctgtttccatatcatcttgcaatgtattaattgtcaatttgattagttcttcaatttggctgcatccataaggattaaattcagttacctattaatatatgtgttgttttattgtttaattatgactcatctttccttcaaaaaaataaatctatagcaatatccccttcttatgaacttggttaggaacttagatttctttactttttatcatggtatctacgtacatgacatggttcagtgtttggccacccacgatatcttagctacgatgaagagattgtgtattgtgcaaaggttttcgtagagaataaaatatgatataccactaagtgatgatttgatcttaaacgtaatcgtttataaactttaacaaaaatggtgttaaattgctggtaaaccaatgcaattcaatcatttaattgccaataaattttcctactaacattattatttcttaattactaattatactattaaactaactaaaggttaattatataaaataggaattcaagatattaaatgacattggcttttccataatatatacatctacatttcaaccagacattctataatcttaagagaaagtaccaaactattaacacactatgcaaaagtatataatcagactcaaaagggtccttagatctcctacttcccaccttaaacgcagaaatatctcgaaccttgttatactacgacatatgagatgaaggagacatgactatattttgagtagaacccatcttttttgaagaagtctcaagctgttgtaaagtggataagacatcagccatatccggtctgagcttaggttcggtattgagacaccgcaatgcgatgttggcagctgcacaagcccctttgtgagggtactgtcctccaagctt

SEQ ID NO: 129 - DNA, 114505 bp, Arabidopsis thaliana
gaattccacatgatgtgtttaatatatatcatagtctatgatcgcaagttcgcaacgattctttcttgattgcatgaaactaatttatgggtttttatcgggtaggaatatatataaatatatcaaagttcgttcatgtgatttgcataaatgtcaacatgattgcatataaaatattgttgattaattcttccctcaatatatttttgccagcttcacttcccatttagtccatacggatttgctagctattagtatatggatgaataaacgatactcatgtgcttgttgcaagtgtttgattggttggttacatcaacctaattaactcaatacatatacatatatgtatagtgcttgcaacccatgctctcatgtgttttaatttaaccaactcagcgacatgattttccaaagaatgtcagtttttaattttttaacttcaaatatatttttttgattcgaggacgactttcttatactcgtcgaccaaaacgatggacatctaaaggctatctaatattggcttcactagggatacatgagtccaaagatgcactttctacatttggcatgattgtcaaattagatagccctaatgaaactaacattagtgggctgttagtcgcacttaagaaccaaaacctactggtaaaggagacttggagggtggaaaaggcgggagagagtattaaaatgtttatgaagcattatagaatacctttgtgccaaatatagtatgaggaatagcaacaatctctcctagtgtcaagtgtcaaccaatcaaatcctctattttagacatgaggaattgaagaggttatactattttagaaaacattgggcctaagtagacagcccaacaaagcaagtagaaattgtataaatccacataaaaaaataagaaagaaaactaaaaactgttttttcattagtaattccgtatcaatactattttttgagcgagttgttcatataaatacatgttgtttattgtacttgaagtataattcaaagttcaagcctaaccaagggaatgctcataatttcgtcctaataccacaatgaagagtcacatttatatttatacaaaaaacagatttttccttaattgttgaaccaaataatatatccaaatatctaatacaatagccatgacatgtttattctgttgatatatttattgtttcgatggcgtggccgaacaaattatacaattttaaatccaaagaaaaagtttatataaattgctttcatcatttaagatgtatggtcactcaatttgacccaatggtcagagtttggaacccatttggagatcaacttatgtctaagatttacgtattaattgggaatattacagcatttaccgcaacattcgctaacattcttaaatactattagcatcgatagctgtgtaagtaatcaactgtgtatgactttttttgtctacgaattggtatgatttaaatcaataaaatgttggtttttcctaaagactatagtctatgtaagcatcatcagaaactcaccggcctagcgtcagacctaatattaggaattagggagacaaatttaaaaaaaagcctagagacatcataacctaacatttttgttggatgaatctgaatccactaaccattacagtatcaaatacttggagtctaacgcagagttgacaagaaatgatacctttcttcaattcttttttacaaaaatatcaagtcatctattttatcattattcaatttagaccccatcatctttatattttcctaatgtgggtccttaattaacctcagccaagagtagataaatcacctggcccactgtataaaactataaattaatgtgctgatcgcaattataggattttacgtagcatatgtcagcaaaatgccttgtcgtatcttttttgtttttattcgctttaaatattagttcacgttcaatggtcttttgaacaaaaaaatctctgcttgcaattgtaattttaaattggttagtggaagttaatgtggtatctcacgatacgttcaaaattagggacttcgtacaaaagaaaaatgtagatgttcagtgagatgttactagtccaatgtagatgttcagtgagatgttactagtccaatgtgtaactactacgaatacatattattggtttaatttatggccttttgtttagtaataatccataacctcaattagcaaaatacatcggagatgtttttttagacgttagttttgtaaaaaacaaatctagttgattttacaaaggaaattaggtgagagttctgttttcgaatatatcaatgaggaagttaagagagactagaagtagttgagcaaactttaaaatgaagcttcatcaaaaataaaaacttaataatgacgtatatatccataaaacaagaaggcaagtgtactgttgagagaagtgaatctttcactccaacttttctaaattcttgagctgcttgagtcattgagttttgtagctggcaagggttgtgctggaagtgtctaaaccaggtcgttaggagcatagagacttcaaatttcaaagcaattaatcatcaaataaggaatcaagtatcatcattttcgaatgactcgtccgtctaaagcttcaaatttgctgtagaattggtttcagaatgactccccatcatgacattgtcctcgtaaaactgttgtcgtaagaccaataaacaataaatccgtttgtaaattctatagaaaattgttaaaaaagtttacgataaaatttgaagtaaataacgtatggtctacatttactctcgctgatttagttggcgtatgatcataattaagtctgactatgtattaggagaacccacgtacgttctaaatcatgctctctaacttataattatatacgttatctaacttataagacgaaacgcgacgtaactacataaataaaatgatctttaaacagcatcaaactatttggattttttgtctgaacacacacattctgatatgtgaaacaaaaaacaaaaaaaaaatgacgtaagcttctcacccttagtgcaatgggggagtcactcgtgtagctacatcacgcttgtaaagtagcttcaccgcttcgtgaaaggttatatctgaataatagataatgataaataaaaaagtaatgtatgataattcctccctccctatatatgattagagaaattaaaccaataatatcatatctttctccaatagcattgaagatctccttacctctctctttctctcgctacttatatttatttccctaaatccttggagctaggagacatcgtgccgttttcttatttgaaagacaagagggagatagatggaggtgaaggttagaagagatgagttggtaccctttgtagcaatggctataatggaagcatgcacgattgctcttacgataatggcgaaaacggcgttgacgggagggatgagtccttttgtgttcgttgtttacacaaacgcttttggatctattcttcttcttccattttctttcttatttcacaggaatgagaggtcggtccacgttcagtattttatatcatagtatatatgttagtactaatcaatcttggttcttttctgatctttggtttgtatgatgatattttatacttgcagaacagaacaatctatcttctcttggccactcctcgttcgcgttttctttctaggtttcaccgggtgggtacataatctatctttattaaataatgttttcttaggaagttatcatattgattatatgagtcgcagaccagattcttacgtactaatattattttgcaataacagtaacttcgtggtcctaaaaccaaatcaaaagatgaggtccatgtttcgaaaatctatacgtacatgtatcaaccactaattggttggatgaatattctatggcatggatttgcgacgtcatgcatattcaaaaagatacaaaaccgcgtgccgtttactcggttataaaataaacaactaggcctaatatgttctattattttccacatcctgacgtttctatgtgagcggcgtataccacacaccatgttttatttgtgttaaaatagaaataaaaacttgtgtgacgtatatgttggttcatataatagtttactcacttgtgagaacacacgcatttgcatgcattgaacgtacataaaatgttattcatgcatatgcacatgcactgattatattgtaacattttaaatatgtgaaggatatttatgttccaaaacttggcatttgtgggactacgcttcagctcaccaatagtagtatgtgcaatgggattgcaaatcccgtccttctccttcctgctctctattattctcgggtaagacatctctcatcaccatgtcaaactctccacataaattatatgaatgttttcaaatatatatataataaatatacatgcatgtgtagaaggagcaaattggattggagaaacacgagtacgagggctaaactgatgggaacaatagtctcgttaagcggagcttttgttgaagagttgtacaaaggtccattcataagaccagcttcgtctgcttccccaaatcgttttcttaaatcagtccctaaacttttggtctactacaacctccccgacaattggtttctcggctgtatctttttggccgtcgctgttttttctgtctccctgttcaatgttgttcaggtactcaatcttccattacggaaaccatcgttatccttatgcatgttagttacctttgaggttaatatatatttcttgtttttgcatgtctttggcagacagggacggtaaaaaagtatccacatgtgatgaaagtggcttcgttttacagcatagtcgggacgatccaatgtctactattctcgttatttatggaaagagaccttagtgcatggaagatccaacctaacttcgatctttatctcattatcgccacggtaattaaatctactttttttttttgttaataacatgcatttcactagatttgatcatttgaatccaagtagtgatataacgattacgctagatcaagactcaagactacatgttcagtttacttataattgattgagttttaaaagatcaaatacataaagccatcgattgtaattaacgtttctaatattggtgactataatgatgtgtaaaaaacagggaacattcggaagtgtaatacgaacaagtgtacacgtaaagtgcacccaaatgaaaggaccttattacgtgccattgttcaaaccctttggtatcttttgggcaacactctttggtaccagcttcttcgtcaacagtcttcactacggcaggtccgtgaacaaattcattaatcaatattctaaatactaattagcatattatcacgcatgagtattaagctatatatgttggtgcatatgggtgcagtgtgttaggagcagccatagctggtgtgggatatttcacagtgtcttggggacaattgaaggaaagcgaagaaaaacaaagttcaaatgaagaaagaaaatccatcaaaactattcatcatcgcgatgaagatgaatacaaagttccattacttattaaccaggaagaaagtcctgtatgaattttgtattatatatagaatatgagggtcgcttaaatatatttttggcccctttcttcgttttttatggcgtgaataaggagaaatgcgagtgagagtgttaagtggtcagtgtcgtatgggagattgctgaagtaggctttttggtccgaaaagcaaaacctgcccaatgtatatacatgtctttgaatatctacagctcgcttcttatgtttctatgtaatgaataatctccaattcatggatcaactattgtattcctgccattaaaactaatgtaaatatctttcatattttgttgttcaacatctagtgtaaatagctacattgttgaagttattcaatgcgagaaaagtcgcatataattaaagtcgcgtatgttaaattttataggtttctaacacaaaatgaaatgatactaaaatttgattagtcattttatttatattatttataattctacctaaatttagatgttgaacacacttcttcatgtgcaaaaaaaaaaaaacacttcttcaacggctcttacataatgccacagccgtagtgactaaaagagcattatttgaaatattttttacgtagtaaatgtaaatctcaaagagaaaagtcaatgtatattcgcctcaatatataacgtctatacgctttaaaggtgcaccggcaccgtcatgtaggccaagtttaataacttaaacagattgagactggtctaaaggattaaatacaacaagtcacggggtggaatttgaacacctgagaaaacaaactgacccatttcagtgaatgtcggatgtctcatgtctacatttatcttctattataagcatctaatattttgggttttcatttacacaagaatggtcaatggtgaatgctcgcaaaatctaatttggatattaacaacaaaccggtaagagatcccaaaatctaaacagcttgtaagaataacactcgtctctggctagccttggtttaggaagatcttgagctatcttgattctcttctacaatatcttgaactatttgttcggaataatatgaagtatcttgacttggtttcaagaagcttgaagtctcttgaatgtcttcatcaactgttattggagctgttattgcgggtaaacataaaagaggcttaggtggaatctggagagcctctagacttccctctaacatttcaacaactttgctcattggtggacgatcatatggattggtctgaatacaccacagacccaccaataccattttctttactatcttctcatcttcttcttcggttatttgatctgccaaaaaactcatgatttctcctttctcaagatctttataaatccaatctggaaagtacattgaagtattactggatccagcattttgagctcttcctatgttccttgctccaatcatctcaagaaccaccattccataactatacacatcagacttatgagaaactcctccaaaattctgggagaacacttctggagcaatgtaccctatggtgcctcttgcatgtagcattgaaatgatgctttcattatttttgcaaagcttagcaagaccgaaatccgaaatcttagggcataagtctccatctatgagtatgttctgtggctttatatcgaaatgtacaatccttgatacacaatggctatgcaagtattctaggccatgagacacacctaccgcaatgttgtataacgttttccattccatcttcgccgacatattcttggagatgaacttgtcgagggatccattcggcatcaactcgtaaattatagctttcttcctcccttcataacagaatccaagtagagaaacgatattagcatgagatgtcctactcatgctagctatttcattgatgaagtcttctccatcctcgtttgactccttcaagatcttcactgcaacatctcggctgccatcaggtaacttccctttatagacagttccaaatccccctttcccaagaacattctcaaatgattttgtcatcttcttgacttgtacataactaaatcgtttcaacattaccactgcttccatgttcttctcattcaaatcactctttctcatattatttgctctaacctttcccacaatcacaataatgatcattgtagccaatactgatgaaactcctacaagagaataagccttaaaacttaggtgttatatacatcaaaaatgagtaagatagttgagagtaatttcaccaggtttcttctaaagtgtaccaagtatgagttttaacctcaatggaatatttcctgcaaatgtattacagaaattatttcgattaacaaaaaataaaatgatacattctcccgtaggtcaaagaaaagaaaaacttaccttttgcttctgttccagttttgatgtttcctgcctctgggaccgttgagctattgatgtttcctgcctctgggaccgttgagctagacggacaaaacgtgatgacaaagttggagaagtttggacaagtgaaactgctgttatcaacgtcgtaggcgtaactataagcgcttgggcacacgttattgaatgtccgcgagtagatcgtccgcttgcatattcccggtggtacgaccaccccagaagagagtccgatacagcaaagctctggcaactggtatctctgacaagtggtcatgcaggctattggatggtgcgatccaaggccactactgttcaccattagctccgagggacatgtctcgttcatgtcaataacgcattcaatgcttctgcagtttttgttctcgggggtcacaagcaaagggaggttgtaaccattgaagacgttgacgacataatagtcgacaccgtaagaagcgaggttaaactcgaccactgttgttggatctatggggataccgaggcacttgatttttccggaggtgcagtctcccgtggcacatgagaaaccccctgttgagttggtggagcagagtgtcctaccccagaaacgacctatccatgatgacggcgctttgatggtacgcgtctctcctttctcaagaacaaaaccggttgtttctagtgatctcctatagccgtaggttgcaggccatatggtgtattggcatttgttttctatcgtaaagctccttgacattgctacatataacaaaaaaaaattcaagatatattgcagagattttaaacgtataatataaagagtaggtgaagagtttggtttatacatggacgtggcaatggacgtggtcgggatgaagaaggtggcgatggaggtgcaggtgacgaagctgataattaaacaaaacattactaataatgaatatatatatatatcagagctttattgattctagggcctagtgggaagcacaaagagaagcctataacaaaacaaagtaaacgaaagaactctttattgaatctgaaacttgttgttttattaagacaagacacacacacttacatactgatcttaagtacatatctgaccaaactaaatgttgtgactgttgaaaactgcccaaactaaagttacgactcttacaagcaccttttgctataacacagaaacttaataattaaataacatattaccaaactcaattataaactagcaaggagtacgtaggtgaagagtttggtttatatacctggaggtggagggagcatttgagctgaaggtggaggaaatagatcaggtggtggtggtggagcaccagaacctgtaaattaaacaaaacacctatcatattgcaaatctcagattcataattgcaacggtcgaagatcttggagaattaaagtaccggaacaagcggatagatcagtgttgactccacatcgaaggttgagaccgagagcttgatctgtagtgatgttgaactgagcgagtaaaccaggagtgttgtagatggtgcagagacagctaaaatctttctccatcgcttccttgatcgagttgcaacaatccgtcgacggctttgttgtcgtgttcaagaacctgaagcagggaactatcttgctcacgcactcagtctgtgcttccacctccaccactgtaaccaaaaccgcgaatatcatcatcgccgttgtcatttttctttcttggtaaatggtaatggaaggtcgagctttttttctttgaattacttttaattttgctttagaggttttgtaatattatataattcagtggctcaaaaccaaaacatatgaagtcaaagagataaagccaaaacaagaatataccgaaacttatcgtcgtcttgacttttgataatcgttgaatccaaagaattgttaaccgatcattcaaggaaaaagagaaaaagtctttctctctgttttcattcaataatcaaaagctatcgtaccttacaagttacaaccataaggaagcccaatcactaaaaagtactcccccataatctcaaagcccaatcactaaaagcccatttttattaatctcatcgtttttttttgttttttttttgtgacattgagtaaacaaaatctgggggaagaaaactagaaaagggcaaataaaatgaagattctcttctgaacagaaaaaagagacaaaatatcgtttgtctcttgaaagacaaaaaaaaaagtttgggaaatagaagacaaaaaacatatctctaggtcttactatttatgctctgcacaaatacaaaccccaaaaaatacctgcaaaattgcatagaacatctcaaatatcctcttattcacggtgcccatccctttcttgccagttgccacttgcttccacaaaactctcttataatttactcaaatctaatacaccagttaataggtcaaatgctattcaaattgttataacaatgttctttgcgatgacataattattacaagttacaacaactccattaattacttttactattttttgtcttgacgcagtccgttatacaactggaattctaatcattatcacagctatctacgccctaatataatagaacgggcatgctagtggctactgtagtacatggacagtttaatgccaataattgaaagattattccaaatcaagaaaaagctacgtatacatgacatgtaattacttaatttgaatatattgcaaaaaataaataaatgttcaactattttttgtactcctccatggtttgaagaacggaagaaataaccaacaaaaaagagtatcatccatgtctgtttttttcgtatctaatccaagaaaataaactacctagctactttttgaaatcccaaaaaattattacacattttgttcttttgtcatatgcgtgtaaatgaatgatatcataggatcttcaacaatcaatgttcatcatttaaaccttccatcgccgcaacatctcgatcatgatctcgttccacgtgtcgacaggaccaggtagacaccaatgcaaacaatcattaggaattctctccggtacaccgttcttgaacgggtccgcgtacatgtacggaccaggatgtccgtctggtctcagtaccgacatagccgtcacgtccaacacctctaacctcacctcagccgcagccgccgtatattcctcaatttctattttgcgcatgtccaagtccagaccttctaaaaccttcccttcgtacggcttggtcatgttacatgcgccgagactgtcccaaggccgtccttcaaaatgtgatggcgaaaatgtcgtcaagatcacctcacgaccacttccagcaaccgctctcaacgttgttcttatcgcttttctaaatacatcataaaaccctacctcggtacagttacttgtttcacaagaatgacatcccaaaaccgaaccagactcgtagtaaaccgctggatgcagaaaccaatgtcccacagagactacgaccgtatcaaaacgttctaaatcattgccccatctctcatccacgcggtctatgtgcaatacattgtggtccaagtttcccgatttctctaaaccggccaccaaaaacggggaccagtaaaccgagacagtgacgttgtgtgactcgaaacgccatcttctgaatttattgtcttctccgtttctatagacgagatcagggctagagacggtagagagcaagcataaaagagactcaagctgatttctagccatggaatcaccgataaaagctagatgcttatctctcataagatcaagaaaccggttcgagtcgaatctcggtatatcgcattcgtttggtttccatttccagtaaagataaccggaatcaggtctaccatggcggaaacaattctgaccatccttgattgttccacatgttgaaccattgtagagtggaccaatctcgtctctgacccagttcccttgcgtataatcgcataaaggttcatcttgtatatgatcaaaactctcttggctttcttcttctgcagatttagaaaacaaccctaaagttaaaaaaatccattcagtttttggatatacacaatattgaagaagttgaataattaccttgagaagatgaagagaagctagtgatcacaacgttagctgcagagtcttgaagagaggtgtctttaatggaggagaatggattattaaaacagagtcgaaacagagctattggtataaaagctaagactataaaaactatgatcttcctctgacttggaacattttgttgctcgtttaatcccatttcaggaacatagaacaacttatcttctttttctctcttttattttggctttcgtgtttttgattattgatatggagcttgtttctaagtatatgtcacatcgttttttggttgttgttcttgttttatgtggaagagacgagacgagtggttcaatggttttggtcctttttggaccatggaggtatattttactcaaaatctttattatttgtctatgtcaatgctattatttgtgcttaatttacaatattttccacatgaaaaatatataaataattttccggagttgtaagtaggttttctttactttttttttgttgcgtagagaaattctaaataattgtccaccgcatatgaatatatgcacgattttttttttatttttttttactcaagattctgttcacttttcgttaatgaggttttaaaagtttgttaaggagatttattaatatgtttggactatcatagtatcatcatttggttgctaaaatatattaagattatatcaaattatcaatacaaatttattagtttgtggtggagaaggaagttgtctttgttcagtgagtggccgccagtctgaaattgtacagacgctgatggctttagtctgaatatggtaaatgacgaaattagccttggataatgtgcgtcgatgacattctttctggctttgctcgtgtcagggtataattgtcagtgtacacagatgccgcgatgtggtttgattaagttaattaatcctaatatcctataattagatggtgacacgtaagcaacgtagttcaaaagacttttcttaagcgttatctgaagtgaagtcttaatcattcgaatatttatttatgtctcatgaggaataattaaatcactgttaaatgaagttagtaaagttttagacacttcacacatctttttttaactgttagatgagtgacgttagtaaagtttgacacttttacacaatttttatgatagaaacagtgatgcctgttgtacggcatcaatgatttcatggcatagtcaacgcagagatgattcattttacccaccaacatgtaatcattttactagacggtaaaaacttttagagcaataaaagatacatttgtatttgtagttcaaaataagatttcacagattcacgacgcatgcagtttgtactgaatagtacacttgacctaattatgatcaagtatgggtaaatataacagtgaaatgctagtctacacatatatatcaatttcaatactgaaaaaaaaatgtggatcaaaaacttacatataaatcactaattttaataatctagctgctagtaaaacaagaattttgagatagtaattgtccactacatcataattaatagctgttaaatgtcaataatataaagtggacacaaacattatgtgtagaacgcatgtggaagatagactcaaacaacatgtgatgaaagatgtgttatatagttttgttttgcgatgagtgtttcgacttgttgtcttcatctccgttaacttcggtccattccattcttccatgtgccctcctctttctgatcattcaaattgttacccaaaccaatcatctttgcctaataaaatcatcaataaaattaatggtcaaaacattaaacttaatttttccaaattcgtggtaaaaaaacaaattgtcagatgaccaagattcaaatcatcccactgcgatttcagttaattgttatttaaatttaaatattattatgaaaagaaaaaacaaatctagtaaagatttagaaccaacattcaaagactgacactcaggatttgaaaattaaaagtagtgacaggagataatggtgatgtagtagctcaccagcttccaataatttctcttttgacaaaatataaaatgattagtttaatttatgccagctggatcacttcattttcctcttaatatctagcatcataagcagttaacaaaaagacataaaaataaaataaaataaaataaaagtaaaataaaaataaatctagcataaacatcttattaagtaacaaaaggtctaccagtggataagaatagtattgtatatactttgtgaaaataattgaaatttctgtaaaaaaaaaaaaaacttatatgcaaagctcaagagtcaagagtaagctggtctaaactctaattgggctatattaataaattacgcctggtaatagcttaaatagtgacgacccaggataggtttatatgggcctatatagctctgaacagaagcccatttacggttacagtttgttattaattgtccacgcgccataaaccaagatattttgcaaccgtcactttttcaaaaccgcgatttagaaaccgccggagagttcgttcgccgccatgaaaccagcaagtgctacggtggctaaagtagacagcggaggagaggacgagaaattcgaggtggggaaggtatacgctgtcaagctgaccaccggagatcagttcaatggcatcgtcttggcttatgattctgaacccaacttcgccgttttcgatatcctttttcgaaatcgctactcgcagctcgtagattcttatctctgctacttcgccttcttgatttcatcttcttgtgtttgttttcgcgtattccttgacggattagtgattttacaagaaggcacgaagcctaaacctctggattcgaaatccttacggatggtgaatgtgaattacataacggagatgaagaatctggggagggttaaggaacgtctcgctaaaaatactttggttaatcttgatggactcatagagaaagagaatcatgctattaggtgatagtttttgcaatttgttgtgaaaatctctatgattgtttcgattttatcactgattttgattaatgtattatgcagtaacgtcgagaagattggttttggtgttaccgcagaagggcagatgatctttgacgcgatttctaagacgtaaggatctctttggttctttatattgaatggatgatgatgatgattttaatacaatccagtagtgtttgaaatcttgttaatggtttttgttagttctttgtgtgaagaagataacaatagcttacattgttactgcttttgctactttttgtgaacagatttgtgctttgtttctgttagcaacgagggttggatcagatgcttgcttatataagtaactgtgaatcgtttagtttttgaatctggattcaatttagtgtttgtattgttcttggtttccagaagatgtaagttatttggaactaatatttgcgctatggttgattgtgtcttttgctttgcttcatttgttgctactgtgaaaatgcctgtaaattagcatcatatctcacatctttactagagttttcatacttgtcatggcatagcgtttttattgcttgtggtttttagaagatgcaagctttttgggactatatatttgacgaattgtgtctttagctatgcttcagttgttgctgctatcaagtcacaaatctttactagagtttatttatgttggacacttggactacttgtcatggcattgctgaaagtataagctacaatggagtaaaattgtcaaagaaagtaattatgtagtttttgctaccttggggtgagttacattatataaaactcgacatggtcagaggctacttatgttgtggaccttgagttttccctgttttgcatctaagaaccgtggtgacaaatggttttatgcttatgatgataatcattctattgacttttagcatatactctttttttattcattgttatgtgatgctgcattctccaggcttcctatacgctgggtgaacaaagaaatgctggtaatgggagatgtgtttattcgtagcccttatcattctgattgtgtctatggaggaccccgtatggtcaatgaacgagtaaagcatgtggtaagtgtcaataccaagtaataaatgtaatatttgcgtttcatgtcatatttatacagttctttgttgtgtcacagctggggcaggagagaaagaagttgcaactcagtgacacctgaggatattgaaggagttgttcaatgaacatagagcaatagcgtaagtctcttatccctagaagtaccctagatgtgataccatgtgtaaattcgattcacgagaagaagatttagagatttttgagttgcagagatttaattttggtgttgacattgacaagaacacagagaatgttgttgttacactgatttgagacttgaagctttagtgaatggatggcttggactagttaagacttaggatagtgaaattctaagaccttgatctacaaattgtgaagtcaccgactttttacaaatgggtctttagccttttcccaagtcatagcccaaatcacaacaatgcccatattgaaaatcttattaagcatggtgattagagaaatgactaatttatagctatgatgtggattcaatgtattattgatatatggctcctacaaagtcacattcgcaagcttctttaatgtcaaatctaaaagagtgttacattcctttttgtctttctttaactaaaacaaagctttctcctctctaatccgcttttgctttcgcccccataaaaaaaaaatgcctttcgctttctactttctactttttcatccctttgctgaagtctctgtaaaaaaaattcaatctgaaaaaaaacttacaatcttactttattgctttcagtcactgtgctcaatgctcattggttttcttttatgctcatttcctttctctcacgttcatcctcttttttccttacactctttttacattaatcaaaaagaatcgaaactatattctaactgtgcctggttatatggttcgaacttcggtcacacgtgtgtgcgagtgtccttgtaaacaacatgaataggttgggttaggtaaagagtgattgatgatgaaacaaaggactttgggaaggaggaaacgtcgttgtccactagagatatgaaagtgcaatagtgactaaatcttggtttgtgaccataaacaacaaaaagcaaacccacgattttttttctaaagtaaaatacaaatgagagacgctccctcgagaaactaagttcactcactctctcacgccctacgagtcgggccatgccaccattgattcttctctgttctctcttttcttttattttttattttaatgattccttcactaaatatcatctcatatatcactttataattctttctacttttcaagcatccaaagtttgattattttaatgaatatatagtgtatcttcttctctaaagattaaaggcaaataaagaatccatgtgcaaactttgtttctacatgttctagcatatattccctcgcatttcttttttcttctgtttcgctttaagaacaaatgttaaaatatgcttttgtatgtgcttataattaaatcccattacgtacttgattagtagtcggagaggtgagtaacgtgagtttgatatagattgcatgtaatggtaacatgtacgtagtgtataattatgaagaaatgatcaaaatagctatgaaatacgaatgtataaataggcgatttggttaaaaatatgcgtattatatattctgtttttattcctactaatatccacatgatctacatgcgcttatatacacgatacaaactcatatacatctacatgactacatgtgtatgtaaagtaatactaataaatctgcccattttctataaattaaaatgaatgcaactcctgtcatataatttcattgttttgtctctaccccattcccattagttgtcattatccattattctataagaaaattaatgtatattctgtttgagaaaccaagtgctcgtgaagtgtatgatacaaaaaggtatgcaactaatggcaaacgcgtgtaccaaataacaggacaaggatcaattaagatagtaattaaaagatgattgtctttatacgctgatatataagcttaggtccctttgtgtccccgtgtgtcctaatcaaaacccgcaagagaattaaaataaataaaaagttaataaacaatgataaaggtaatcccccgatgattaatatgtccaaatgtgtgggctggtcattatttatttataattagcatttagcagttgctaatcacctaaccatactctctctttacttttgcatcattttagattaaatagtagtgggtgaagcttctattctttctcttataaagatattttgtatttatattcctgtaatagttatcttgtacgtatttatttataactccatctggttcacgttcaggttgtcatgtcatattgatgctctgctcttacaacataccatttatattcataattcatgtcatgaattttacaaaaccatgccaaccttttgtaaaaggaaagaaaaagttaataaatagtgactagtacgagagtaaaagcagtaacacatttccttacgtacatttgagtggaatcaaaatggtaacagtgcatgtttgatatttggatttaaaatttgtttatgtcaatattatcagtgtatggttgaaaaatgggaaaagtgaggtaaaccaaaataataaataaacagaagaggagcgtcatgaggatttatagaaagtagataacgttgtaatccgatagataagtaaatgattagtataaagcatatgactatgagacgagtgattagttcattggagggtgaacaaataatgtcgtcgatggaaaataaataaatcacattactaaactaatcaactagaattatgaggatggagacattttctcgacgtggggtgcacttctgtcggcacaaaccaacttagttataagattaaaacacacttttgtaaaatgttttgttttgcagtaagtttttttctttttctttcacttcttatttccttttttacttgtaaaatcgtgtgcatacatatataaatggatagtcaaagatggtatttttgtgtggctaatgtttgaggggttcgagagagatagaacggtgtagctacgttatggtttcgtggtgagaccactttctctgacatggagacagatcaacatcacatgtatgctactgctcctattaattgttcctctttactaaaatcaagagagaaattaaccactattttttacttcttttgtaatttgtttttttcataatttgattttcttttgtatatttactgttgttaaaataggtatataaaacccttaatcttttgcccaaaaaaacaaaaacaaagaaatgtgtttaattatggcaaaaatgaggaaggttattacattttgaacattaaatacttttttttttcttttggtcttaaacaaatacaattttcttttgtctttttacgttcgtcgttcaataaaacatacactcgatccacaacacacatgttcacatgcttcgtgctcccacaggccacaccaaaatcaaatctcaccactactcatattatcctctcacgtagctattaaccttctccacgaccattattgagttcaatgtactttttccttcatataatagaaacgttttatttataaaattcaacctttcaagaaaccaaaaaaaaatcatatatatacacatacgtgacaccttacacgcatgcaaacgctactaaaacgcaccgtgacaaaactcatttggagtccacgaatacgtagaaatcaaaaacacaaaatttcccgccaaaataaaagatttgaagagaaaacaaacacgtgagacacacgcctccgtcacgtgaagtcacacacaaggaatcaaaaatcttaaaaatccaaacaaaaaaacaaattatatatacttcgcaacttgattttttttttgtttgatgatgaagctgaggaagggtcccatgaactgctgcgatccattaagacaaagagctcagaaaaatctccactcacaaatcttttgcaaacgctcccctgtcttatccatcagtacctgtgtgatgaggactctaatgcaaatactcttctctctctctctcacacacacacactcacatgatcatatcttttctctaacacgtgtgtgttacactcacttactcattttgctttcttgggaatctgcaaagccattaatgatgagcttcgtctctcccaaccaaccaaccaaccccaaaacccaatttttaccctttccataaaagaaattgtaaccaaaactcttattccttccccttggttggaaaactcttaattactttaactcagccaataaacacttttacttttcttcatcactcccttattactatgtacttgttaaaaaatatactctacttaaacagaagagggttttttttcttctaggttttgtttccttggtcctctactttcactccccaaattttaattagaggtagatgtttcatcacctacccatgaatagccacttaattttctccttttacaaggagaagaggatgagaaagaggattcatcacttggccttgttaacgtcgatgatgcccttacactcactcgaagctttgctatcacttttggtgtatttaaccggttattctcgatggccatcgctttcatcagtctatagcatctcactatcttctcctgaaagtcaaatataaccaaaagacattaattagcaatctgttactcccttgttccatctaaacgtgatataacaaatcctactttgctcaatccgtcacaccaagtctcagggctctcgtggggattgacaacagaggatagagaaggtaactcgttcgctacacagagaatcgcggctgcagctatactcgatggccagtactcaagaaagctcgcttctgtactaattggtcatgtgttagaaccaacccaaaaatgtgctacctaaatgacattatggatcatatatcatacaaatattacgtaccttttatgttggagagtataatctctgtagcatgggagataaagaacccgagaaaggtacccgaaggatcgatcttgtaagcaaagaagctaatgaaatcaaacggtgtaaccgatcttagtctccaatctaacacacttagaacaagaagttccattctttttatagtttttgcttcaaataaatacttcactcctgcaacctacattacattatacagagatacataaattaaagtttcttaaaaaaacagagtaaattcagaatgttaaagaaagaatgataatatatgtttacctgaaaatcaaaaagagaaggaacgagaatttcctccatctttgcagctaaagacaagcatgccactgctaaaagttgcattggccaaccactcgtttcctattttacagaaattaaagctgattaatataatcattgattactatatactctattaagtttaattacaaaattaatttaaaatattatatagtagtaggagcgttttaacactatgattacaaagttttcaataaagccgatatatgaagtggaaagtttactgcaaaagtatactattattatgtaaacgtcaatgtaattttttatcgaaaatataaatttcaataaaataattaaaaaacgaaaaaaagttccccagcccgctcctgttctatcgtttacgtacattccaatataagattaatttctactaaattattctataccgattataattttttgctctaataaatttttagtcgttttcatttttttctgaagaaaagtcaataaacaaatcgatccattgaaaaaaaaaaagggaaataaaactgactttttggggttgttatttgtcatatcaatataataaaaaaacagagacaatagaattaactaacgttgacgtttttaaaacatttaccggtaatcgacgagcgtaaagaaaccgatccatatagttaacggcgaggtacgccgttaaaggctgaaagttataatacgcttgtacctgtaaaccaaacaataccacactactgtaaaaaaaaagattctctgcatgtaacgattcgatcagcgtattttagcgtctacacactctccggcggcgtattttagcattgaaaaaaatgagaggtagagaaaaaaagtgaataggctcgccttgagaatccatgcgacggaatcttctctagcggaagcatcgagagatcgagtttgaaatctagagagataatcatgtccaggaacgaagtgacgctcgtcttcgataaaacaagcgatagaatcaccaggccatgaatcaacctcggaagacgagaaatcaaccgttgactcaccggaaaacacaccggagtcttctccacaaaacaaatccatatcgttagagaatgaaacagacatgtgtagataatcactaaaacggtaactcctcattctctccccataaccggagatgaatcaaaccggagctagataaaccggtgagatctagaagaagcgagaagagagaagtgaaatgtgaggtttttgaattttgtgtggagagaagagtgaaggtttaacacattcatttgtttggatatataaacaagaaacagagattttttgaggttttaataattttttatttaaatgtgtttttatttataaaaatggtgttgttgcaaatgaaacagagagacggttaccgtttccgttatgcccgagaaaacgggactgttgtcactgttccatcaatcgagacggggctggtccgttcgttcattgggttttgttttgagtttttttatttgtagtttatgtttgtgttttttgactaacatgcgctaaagtgaaatgcgtaggttaggaacaaggagtggtgtaattacgtaatacgtggcaggttaagacgttgcatgagtgagtacattacagctaatgtacgtttgtttgcatattactcgtgaagagagaaggccgtacgtgtaatgtattaattggtgacgtgtaatgtattacttggtgattagcttaatgggcctggattatggaacattttctgtgatttggaccattttgttggtcgcttagaaagaaacattttttcgtatttaagatttggactttattactattggttaaaaaataaaagcatcgaaaaataaatcaaaattttacagaggttttaaagtcatgacgcttaatcatacgtatatatataagtatttgatttgctaaaatgcaatttttttggttattgtttgctttttatgtgattagatgtaaaactcctgaaccattttaggcacatgacaaatgctcaatagatttgaggccattttagattcaatgatgattttttaatcgaatgtaattaattgatgttttgcattatagtgcaatttttttgctgttttcttgaattaaccgtatgataaatcagttttttttttgtaatatcaagtgagggaagaagattccaaattttaagattggttatctaattatcttgaattataaattagtagtttaattgagattggttaatcagaggaaagcaaacagtggtctggagcgtgtgggaaagagtagtggaagtccttttcgtagaaccggagattttcttcacattcctttttgtatcaatatgtcatatttatttggtcccttcttggtttaattatgccataaaagtgttaaatcattggcccgtttttattaatcactcccgtagttactttctttcacgtgtgccttacaaaatactttgctccttcgatttagattttagactttaattataccattgggatgatctcggtttagattgtagtagatttttcgcttacctctaatatatttaccccttattttagttttcaggtgtattagaaaaaatgtttcatatttttttttttttttaacattgtttcatatttgttttgtatgtgttttctatgcagatttgtataaatttgtcaatattttcatattgataagaattaaaaattatggaagagctaatatataactatcacttgtatgtactatgtaaatagttgacaatgcttacgtagataacgaaattaacattgagaaaattacaattcaacaactacattgtaccatagaaattagaaacaaatgggatactttttgaaatagaagataatatatttttggtatcttcggcggaagaagaccttcttcattatttatttgttatggctaggttgggctactaattcatttctctgtttaggtagacaatatttaaaacatatggcttacattcagatttgcattcacatttacagttaaattaacatttttatcatgcagtatatgtttatttatattaacattaatgaagtcaagaaactgaaatttgaaaggagggaaaatatgcacctcccaacctacaacaatttatcagactgactacattctcgtggtagggttcgtcatttttgttaatgtcttattttcttaaagaaaatcaagacgattcatgggagctattgccttatagtcaatgatcgttgttgaatggttatttcagatctaattatatggtacgtatgatatcactagacatgatcttatactatcatcgtcacattaattgatactactcgttaagaaatgttttttttcgttctcctgtagcatagtcaactcggaccctattgatatactcttgcatatgtaatcataataatgcatttttttttgttatatacaatgatgatcatgagtccatgttgagttactagaaatataatgaatagttaacaagtgggtcgagtcattttcagcaatatatgttttttttctctacattgagttagttttaggaaacatttctagaatcctctttttaaaggagaacttgaaaatgaataatcaaaacattgaaaaatcggtgaactcagatcattgaagctaccaatttcaatggaatgataatgaggcctatataatattcatacactgatcattgatcgattttttcgccagactccaattttatgtataacaacatgaattgtaactttttcacatttttcagtctctaatcaaacatatcaacaagcacttgcatgatgagtgatgaatagtgacatttttcacatacactgtgcacacagtaactaaagatcattgctttctcatttccactttggtcttggttgaagtaattttatttagtttctgaaggttgaattgtttggaaaaaaaaaaaatgatctccaaaacatgttattttgcatggattgaaaaaagcatataaccatagcaaaatagctgttaatataaaaatgtatggttttgagtttcttttgactataatttatagctcagttttcacaatctccataatattgatcacaatctccacaatcaaactttttattattagagtgtatagttaagcaaaatcccaaaaataaaaaacctagctaggaaaatattcctctaaattaatattacacactagttctaaacaatctgatacgagttgccatcgagatttgcacacgaaaaatgttcaaagggacccttttttcatctttaatctttttggactttggtcggcgttggctgattatgactcgctataccacgatttctgtcccttgttacaaataattctattagctagtctcgattctcttttttctttcttcttttgtttaagtaacctccttatctttcttgtttagtggaatacaggctccgatcaaattcagtcacatgtcatcatttctctaagatatatgtttccacgtcaacaattaatttcagttagtttgtttttatgtgtttatataatacgtaataaatacataaactataatttaaacaagatgaggatttaaaccagcccctagtaataatctaacattaaaacaaaaagtaataacataacaacgatacaaaaaaaaaaaaaatataattacaaattttggtattaaaattattttttctatacattaaatatggaaaaaatatttctcataaaaatatatgtaaatatgtaaaaattcaatcatccttatatattatgttaatttcctttagagtttaaggaaatagttttcgatggttcatgtatttctcattttatatcatattatcacttcgtcaaaactatataaaaagttaaatggtacgaaaataattcgtacttaaaacacataataatgggacatacaccacatatcaccaaaaatattaataataatgggacatgcatagaaggaaaaaaaacataaaaactgaggactgttttgatgaaaacaagaagaagcctaaaatggaattcgtaggatattacattgaaaaatatgactgtaataaatttaagaggatatcacttcaaacacttagttaaaaaccgactatagtacatcctattctttgactttatctagttatatttagtatttacatttgtataccgtctatatatgcccaaaacatgtgaaactatttttaatatagaagtgaagatgtgtccccaataattaatgaatcacatatacgtttttcaacctaaatgtgaattatttcgttaattttgggaaatcaagtttttttctgtttccaaagcatatcttataaactcactttttgttttgataatatataggcacctatttgcgaacaaatttttattatgtacacagtacactcaaaagctttatgtagttattatcattgttatagtgcctaagttgctgcttatctaactatccactaagttttttagtttggtctatatcttagctattaactttagtcgagatcatttaactactatggcggcttgacagactgaggctattctttaatgaaaaactctataatgtaaaattctttttcttagtcatatagaattatagatatctatcgtggtttcaaactttcaatctatatagtatataagtgtataagtgacattatctaaacatgtttatatcctcaaagttgtaaagttactaaacttccgaaaagatgatagaaatagcaaccagaaaaactatattgtattgacttttgactgactttagaactcaatagtgtaggccaactcaacctaacattaaatatttatgaagactaattaacaacaatcatagggagcctattaaaatgttaaagtcttgcgcatgtttgactatataatactaacgtatagttgcatttatttcaatgatataaatattttatatctcattgtactacttaagttatagattgattattcgttggtgatatttaagaccaaatcctaagacgacatatatatgtaagtgtaacccaaaaaaatctaaaagtcataaaccgtatgattataagtatatataagatacgtattatactacagaaacacacacatgtgtaacggaccaacatggatgaagaaatggtcccattgagaagaagagatctaatgacttcaaatcaagaatggtccattttccaaaatagacacgtaaatatatacaaagcttaatccccatccctctattgggtctacacacagcctagcatttttgtattttctgctctgtttttatttttttttaactttacaaattactttttaattcttattatcttcagcttttgttctgtctttttttttattttcctgataaattctcacaacttccattcatgactcgagctgggtcctttgatttgtcacagctaatcaaaacagtattagcacaaaaaagtgtatatcaatatgaccatgaagttcataaaaacatgggacctttgaaagatgttgtctcacatattcatacatatttcaataaaatccattacgtacgattccatataaattattggtcagtcatgctaaatgtaagcaagcaaacatatcatttatggtgttacatcaagttatgacagagtatgattgaggccagaaagtaacttatgggtctaatggatcgtattccaaagtaatgggctttttattaaggccgtaagaggcccatttatgtgatttctttgaagtcgctttgtttgcaagttgcgactactcagtttcttctccggcgaagaagaggataacgaaaagaaaacacatagctatgaacggagcttcgctctgcaactccgttttgcttcattctcattctctctctcgttttcagtcatcctcttcttcttgttctgtgtatctgatttcttctgcgcgtactacgtctaagtatatctcaatttctcatagaattcgacagagctttcgagaagttattgaaaaaaggagtaatgggttttgttcattcgctgtaaacaagcgtagaagtggcgattccgttattgtggagtcagacgatgatgatgaagaagatgatgaagattggggtgaatttgatggagaagatgaaggagaagaagaagaagaagatgaaggagagttcttaccaatggataagatgaagaaatggttagagaaaaagcctcgtggatttggtttaggtaaaaagtacgaaactttaattgaagataagttgctcgacgaaattgagcaaagttggaaagctcaagctgctaatctcaataagcttaagaatgatcctctcaagtctcaacagcttaagcgtgacgataatctcctcaaaggtttcgtcttttcttcttttttttgttaattgagttatagtttggaatcttatttagctttgttgtgttgtaaaggaactggagaaactcaaattgggtttcgtgttcgtgtgactaatcttcctaagaagaagaatgttcatagagatcttaaggttgcgtttaaagaagtaagtggcgttttgagtataacaccagctgtgtctgggaataagaagactaaggatcctgtgtgtaaaggatttgctcatgttgatttcaaaactgagattgatgcaaacaggtatgagacttgtggtgtttatagttaagtggtaatgaggcaaagttttgatttttttctcttaggtttgtgaaacagttcacgggacagagcttagcatttgggaaggttataaagcaaatcaaatgtcaggttgtggagtttacttctgatgattctgtatcgaaggaagtgtacttagataacggtttcaaggtgcagaagcttccgtattctggtcttgaaggagattctagtgctgatgttgttgaagaagaggttttgttgggttcaggggaagaatcggatgattcagaagaagaggtagatgaaagagaagtggaagacgatgagcggaatcatatctctagtagcatagaatcttctcccattgaaatgacacgtgattcgaataccaagttaaagtttgagaaacaagttgtgaagcgagagataagagaacatgaggaactagagacacctttagtttcattccaggtgaataaatctgaggaagctgcagcggaaacacacttggatgatgaacaatctgaggaagctgtagcagaaacactcttgaatgatgaacttgatggggatgatgaagaagaagttgctgaagacaatcttgaacctctgaacagttcattgtcatcctcagaagaaaatagagtagatagaatccgtaggctagagcaaaagcttctcggtaaagaaaaactcttgggtggaggagttggctttgataaaccagaagcaaaacccgctagagttgaaggaaagaagaaggagaaaaagaagaagacaaagattcttgtgaaaggccaagccaaaaaggggacaaagatagaaatccctggatcatcaaagaggtaaagagcatacagcaatttttgctaatcaatgtagaatctctactcaaattgattgatttcgacaattatgattcacaggttaaaggtgaaggagaaggctctattaactggcgtcttagtcaagtatgcggctaaagttgcttcaacctcaaacaatgatgaatgatatcattaacaagtgatcaaattttgatataatctttcatcaactgctagtagtgagccatcttcgatttgtttttataaaagtgttacatgaataggtgataacgttacgtggggaaatgctattttttctttctacatcttcatcaatttgtggagacagcaacgttcataaactacattttcagacttaaaaattgaaacttggcaggtaatacaaaccggattttcactcggcttttaatcggtttcaatttcggattagagaaaactctaaccagagttgtatgaattcattcaataatatgttttttttcttgctgaagtttcattcaataaagttactgttccaacttcaagaaaacttgtaatgaagtgcggttactgcatctatcatatattctagttcaaaacaaatatgagacatatttctgatagagcataggctctcgtgtgacctcctccgagccagataatgtctatcaaattcttgcgtcactggacgaacatccttcagcttcctggtccagttgcttccctgaaagagctcgctaatccgaagcctacatccataagtgtttttttgggtgtataacaacagtattcataggtgactctagaccagaaagcaaacatgctttataaagtttagtggttcatcaaagggaaatccaggtctagctgacacaggagcagtattaaaaactaagaacagaagagtggtatgaagttatcgttacaatgttaagaaaacttgtaatgaagtgaagtttctgcatccatatccaatcagacttgtaaactgcatcaaggtctaggaaatagctacaaacaacgtagctgaatatcgcggattcatcttacgattgaagtatcccattgaaagaggttacaagattaagaacttagaatcatttgaccctgaccaattgtctataattctgaatcaaatcgtttctacttaatgcaatgctactcaaagatcatgatatcaacaaaaccgatatgaaggagccaaagcaacaagctttgattagaaatgaacaaagttctgcgccaagatcaaaagcaacacactaaaacaaagtctacacttctattattcagcgatacattcttgaactaacaaagatccatctctcaacaaaaccaatttagcaatgagaaagaaagagcaagtgtaacaactatgaccctttataaaaccttaatcagctttgtatcttgagctcatacacggaacaaaagcagaaaaatcgaacctttagatgatcactccaacacaactttagcaccaagtgctttcaacttctcaagaatcttctcaccttcttctttagacaaaccagctttcaaaatagcaggagtcttctcaaccaaagctttagcttctttcaaacccaaatcagtaaaactccttaactctttaataatcttaatcttagcagatgcttcaaaagactccaactttatctcaaacactgtcttctccactttagcttcttcactcacaccactttgactcaccatcccaccaccaccaccaacaccaacaccaccaccagctccaggtttcataacagcgactgttggtaactccgtcatacctttcttcttcattataatcgaaccaagctcggagatttctaataatgttagagatgagatctcgtctacgagtctgaatacacgatccgttggtggacttcgatgctctgttggatcaaaagtagctggatcgtaatctgttgggagctttctctgatcgaattcttcttcttcttcatcttcaatcttcgccggttgggtgtaactccggtaaccgccgattcgagaaagaagtgataatctggatgaggtttgagataaatgttgcctgaatctgagaactaagctcatctttaagcacttcttcaaaagctctattatgagttcacagatttgaaaaacagagcaatggtaacgaattggggtttttggttcatctggagaagatgccctaaacagagagacattgggaagagtctctctgatcagataaaatatctaaaagcccaataaaaataggctaggcccgattagtatactttttggcccaaaacgttttcttaaaaacaattgtatttacgtttgtttgttaaattggtaaaaagctacagtaaaagatttctaaaataaatcaaatactagactatcatatatttatagaaaatattagattcataagaaataaaaaaaactatacattaattgacatgtggttcaaccggaccgaacgattgacccaatgacccaaaagagttacagttcaccttctgatccggttttaaaaatattggtaataataactaatagatttaaataataacaaacaaactattatttattcaaataaatcttgtcaataatggaagataaaaattgtccaatataattgaaacttattatcttcaagagcttattactttggtggtgtagtgtgattgatagaaattggtaagttaatcttacaacaataaaatatggaaaaagctaacacaacaaatttgtcgttaggcaattttacaaagaaatagcaaatgatttattgcccttagtaaacatctgacttacaagctctaacgtataaataattccaaattttcaactaaacaattgttgggcccactcgaaagcaggaccctccaaaaataggcgtatgccacttagcgtggagagcacacggtattctttagtaaaaggcgaaagaatagttcgctttgtgctcaccacatggctgcgtgattataatcgaaggaccaaggccttgttttatatgcatctttctcttggaacaaactctcagcttagcgatgtgggactttttctcaaactatttcttttactcttacgcggtcgtttctctctattgttgttttattccacaacaggtaatatctatttcactgctaattacaaatgtttctgactcgagttctaattcttttttttcacactcacaaatcttctttacacaattcaaacatatgttcttaatcttctaattgcgaatcctaatagtctactacgagaatcaatggagttggacttacatggtcaacgtaaatgacagataaaaacctattttactttcacgttgagattcagagatatataccaaccaaaagagtgtttggattacaccaaaacaccgtcgacatttcacaattaggctgtgcttgggttaacaaattgtataccagaaaaagaaaaaatccataacagagagaattacaaaagaaagttctgctgcctacaatcatccggagagaaaagtttcgggttggatctcaaaaaagttatcatagtttcgacccgcatagaggctaacaagaccaaaaagagtgagaagcagctagaggcgagatccgttcattgctaccttgttggaagggacgctatagcctgaagaatcttcttccttggaccctgcattgcatcaatagagtgataccaacttcaagaaatctactaaaagaacagatcaatctcaattgttttcgatcgataagaaacaaaaggaaagtaccattggtatgatgagatcttttagatcactttctttcatctgctttattgtggtcatatccacctgttgtcatattagtcaagtttgttattgaagaacaatgacgaaacagagctcagacaaaaaactaacatggaaaagcaataacgaacctacaatagccaaaatcacaaagctctaagataagaaaataatggtacacttacttcctctctcttaaaggcaagggagtattttccaagtccaattgaatttagaaagccatcaactgatagaggctcgtccacctgttgttccaccaagtagatatacatgccatattataacatatgtataagaagaaggcataaagttttgactatctgatcacaaaggttttatgggtctaagaatgacacgaggtaaatatgaagtactcacccaatgtatagaaagagtaagaagagagaaaattcatccacaaattgagaagaagaataaagatcttacagagaagggactgttctgcataatacttccaagtggaggaagctggctcaatggaggcaatggatgtgggtttgggactggaggaggtaacattggcctggcgaaaggagcaccacttgatggcgcttgaccatttagtacacctctaacaggatatggcgatgctctcatattatcaagcatcctgcttcgtccatgaaaatcttcaatgttactacgtgggggagaacccctggaagaacccatgtagcttctaggattcctaggaggggaaaaaccctgagaagaactcatgtagcttcccatatttctagctggggacagagccctagaattactactgaagcttctggtgctccttggcggtgactgatcccttggagggcccattctccttccagcatttcttggaggtgatctatcccttggactgccagttacccttccagcatttcttggcggtgactgatcccttggagggccaaatctccttccagcatctcttggaggtgatatatcccttggactgccaattatccttccatcacttcttggaggtgatctatcccttgcactgccaatcatccttctaccatttcttggaggggaaggttcccttggaatgccaatgaaacttccagcatttcttggcggcgatcgacccctggaagtatccacaaatctctctggagaccttcgtcgtaaatcttccagagcccatgcagggtgcgaactacttgatgaaatcatctgagaggaaccacgagcagttcttgatgaagataaaggacgatccctcggctcagccatacgaggtcttgtatcaaggctacgaggaggctgctcactccttgagagcttttcacgaagatccatagtgcagccttcatcgctctgagctcgtctctgggcattcttttgcatcagtttgaatcggagatcatttcgactgatctgcaaatcttagtaacaaagaggggtgggtcagaaatcagcaaacatgcgctagtgtgtatccagtaattcacatctataccatttccactgaaacttgcttcccctctttgcctgcataaacaaagaaaaccaaaaactttaatctagtgtaccttgcagcaacaagtaaccaaattcaaaacccataaaaccgaagcatagaacacacaatccatcagttcctccagagttctcaatactcatctattcacaaccccgtgaacaaacaaaaaaggtcctagatatcatgataataagagcaacatcacagattaagaagctcctgacaatcaatatgcagcagtagtacacataagagggaaaaagttaacaccttttactgaccacctcttctccaccataaacagaactatctaacggattccctaatctctctttgacagaccgcttagtcccaactctaggtaactcatacccatcatctatatcacttgcagctcgattcaccacctgcaaaagaaaaacatcaccaaaataagcacttttctagactcaaaaactcattaaatcctacaccaactcatctctataaaacaattctaaagctttcattttccagattcaccaaatcaaactcctttaacacaaaaactgagagatgagaccttcaacgtacctgaccgctacgacctagagttatagtaaccctactccgtctcgaaccttccgacatttgtgaaaaccctaggaaaatcaactggagccaattctaacttacagtgatataaaaccacaaacaacgaaagacaccacaatcacctccttcaaaccctaatcgtacgaagccgaatctactcaaaaatcacagaaagagagtaaacaggttcctgtaaaaaaggtataatagaatataccataagattccgggggaaaattccgatgagattcaaaacgggaaaaaaaaaaacaaatcggaaaagtattaaaatacgtgaagaatcggtggagacgaagaagacgttcgtgacgacggactcttgcttgggctttgaaagtgctgcgcagtgccaaaccaaagagacctgactcatctagtggcttcttcacatgctctcatcaatcgctacgcaaattttacgagataggtttggatttttcattattttcacgtttgaccccatagttcttttataattatcatgtccttttttgggaaattaaatcgaagcgtataataataataaaaaatttaataaaaatgagactgttatatattattaaaatatataggtattaacttatcgatatataaagtagtccaaaaaattgattttagaaccgtaaatttaacaaagctcaaaatgtatgatgaacttaaatggtaaaaaagagcacaagtttgtttgtgggtttatgtgtcctatcaccggataagtcctataacttgactaaacattcactatctgataaacattcactatatatccaaatccaacaattccacccatcttcgtttcctcattttttttttgatttatacacttgcagtttgtgaacatttaaactttctcaaaaatatattgccggaaattggtaaacagttcatcgaaaaaaccgtcagaaatgttttagtttaacaagttttctacatagatatattccgactaatatccaacaaatatttttatgaagtggtaatcaacaagggacgatgataaggagagggatccatcccgtttgtccaagaagagagtcaaagttctaatttgcaatcatacgagggaaaaatatcaaaaaatccaagagaattatctccaatataaaacagagtttttttagacgataatagaggattgaaggtaatagatcctaaagtgatgaacaattgttaacttgttgccgcactaagatcactctcaacagattcaagcacataggtgatgaaacagagctgaatcgatggagactcttcaactagactactaaggtcattatattctttgaaatttccagtggatgattgatgagtcgatcgtaacaatatggatcgagagacgtcacacaaaagatggaatatctatgataagttaaggacacccaagcttcaagggttcacacacaagaacgcgctaaaatgtttgggtaaagaaagctaagaaaatgtataacacgaaatcaaacataggtataggacataaagtaatttatatacaagtagtatatgtgaaatcaaaaactgtagaaaaggaaccaatgtctaaatatgtgtgtatatatatccccatcctttaataaaaaaagaataagatatgaggtaaatcaaactaaaagaattgaagtaagaaaaaaaaaactttatctacggtaagaaccacaagaccaatccgacggttgacaacaagagactaacaattgttgatctcgatgaaccgtcgattctccaggcggcactgaagccaccagtgtctcgctggtgtttagtggtcgacggtggagatgttgtgccgttgaagttagggtttgcaccgtacaagtattggattccttccacgtcatcattggttaagtcaaccttacgtttccctgtcgtgatcgttggatacatgatggattcctcaactgaagaatgtcctaaacctagaagatgaccgatctcgtgaaccgccactgattcaagatcaaccgcagcagttacggagaggaaactgtctaggtctccggagaccacccagttctcatctgcgtctaggtggaatttcccgctgggaggagagaaagcgtgagctaatgttcccaaaacgccgtcgaaaggctctccgtcaccatggtcgccggtgtagaatccgattgtgatgtcagacgtcgagaaagactcggaaagagtgaagtttaacgcggtgacgtcagaccaacgaccaaaagcgcgtgagaacacgctcttgacctcttccgtcaacgggtttttcgggtcgaacgcgtaggtcaagtcacggcggtttctcggccaccgtggctcgcctgggaataacgtgtagcgtttaaccgcgtgcaaatgcgtgcgggagaagttgacctcgaaggtctttcttctcccgccatgcatcaacgaagtaccgttgaccacgtcaggattaccgcaacgcgggatcacgatgtgttgaatggtaagcgcatcaagctcaccggtaacgttaagattgaaattcgtctgatacaattcgacagcggctttgaggatatcatcaaaatcatcggtgaaatttcccgaaaacgtttcagggatgtaaccaaaacgttggaagtattttttgatacggtagagaccatcaacgttttggccgtggtgacaaccggtgaaattggagaaagcgtcccagaaaacacgtgtagtgttacgtagagacggtggtaccgcggtggagttagggaagaaccaggcggaggcaggagaaacaatcaagaaaagcgataaaaacccgaaaacacaaaacctcatggtggttttcggattataggtagccacccaaaaaagaagaaaagaaacaaatggagaaggtaatatttaggattttaggagagaatttgagagagagaagagagattaaagctaaaaaacaggtaaagccgtttagaagatggttttaaatataagatatataaatcgaggtctgcgtttgcgttttgtgttggcgggtgagaggtcgttggaatcgtttgcgtgtcttttgtcaattttctagtttttaattaagaagaaaaatggtgaatgattccaatggaaacatctattggtcttagtcacgttcaaacttatggatgttattggtttgtgatttatatggatttttaatgatttataatattaggaagaatcatttgttattcaattaagattgtttaagattattaaaatttaatgttattagtttctgatttgtaaaatgtaatctaaaatctttataaatttggagttattgaattcatactttagtaaagtcattgaattttttgtgttattcaattaaaacaaaagtattaggattgttaatgatttaaattattgtgttattggtttatgattttatacatttttcttcacaaaataaaatcataaaaagtatcataagaatagagagattgtgaatgatttttagaattgacatggatcatcttcttacccattaaataaaaaccaatctatgtaacgttatgacatctctctaatcttttcaagaaatatcatgaacgtaacttttaaaccctctctctaatctttctatataattatgaactatgtgtaaattttttatatgagaacttaagtacctctaaactttaacaaaagcacagtaaaatattttgggagagtagtacacttttgacatatacaaaacctatgtagaacttttctacgagacaattttataaaatatgaaagaaacaatatttcaaatagataaaatctcaagtaatcatttcaaatctttttaagttaggaagactttacaagattacggaaaagctaatcaaagagattatacaaaactctctaataatcatttaaaatctttgattttatctattatttatattcttttaaaattattaaaactctttcaaagttagaaaccaataacacccgttaaatagaggtcatcaagattaaagaagacttgtgcaactgaaagacttggctccggtttaaaccggtttgatggagctgaaggtggcggagtcaaataaagacgttgaactaagttttgctttttgtttagtttcaagttggagttggtttggtcgggaaagtcatcaaccaatcttcaacttacacgtttttaaggacgtcacaatttggtagcttcctggtaaataatccataatcataggtaaggttggtccatttaaatactttgtttccacttccaagtcattgttgacaaattcttactattgaagaatgaagcagagctaggtaccaaggagataacattgaatatgataagagcatcatataatatattcacacgaagattgtactaaaaacgtggtttactttccctctaactaaaagggtaagcttaaatatataaaccaaaagtatacaaacacaaacagacagagggagagagatagacatacatgttaattaactttgctaacacttagaaggtctctcataattaggaggtaaagaaggacaattctggttcatgtttggatatgggtaaatggtgttataaccaggtaactccattctgtattcacctagaatttgacagaagtcaagcttcccttcctcggtgttgcaccaactcggtaaccgagtctggttagactcaaataacttcagagtgtacgcatctcggatctgaaaatacgaaagaagataaacgttcatgagtaatgttaatggaaagatttgatattgaaaagaaaaaaaaagaaactcacagtgaattcagtgacttgaatgtgatcagcgagagggtcgaatataccagcagctttgtacattgcaaggatgaaagcaacacatgttgtcgatttaccgtcgctataaacccactcatcctgttcagggatggtgagtaactcatcaaatgacattccacgcctcgctgtttcttcaagtatcccatacaaatccagatcctgtacaacggaaacttattagttagcctgtacgtcctaatctgaagaacaatagaaactggatattgtacctcagtaccgagtcgtttattaagtgcctcgttccacatattagcagcatatgcaggttgtacacgagtccacatagacatgacagaaataacctgaaagttcaatgtggcttgttgattaccatgatgatcttaatgatgatagatctttaagaatatcagggattaaaaagtaccaagtgagcatcaaggggaggggggtagttatcgcctagagtgtcgatccagctgaatatcatgttgtgatatccatacggtttgcccaacatactccgtgcatattcccacgcagcagtattgttgaactttgcccggatatcaggatgtagaggaagcaaagctacttgaggatttgaattatccttcaaagtcagctcccaccattcatcccaagggatcacaacaatgatttcttcaccctatggggaaaaagatagtaaaatatctctctttctatccactaacttcaaaatgtttaggtctaccttttcgttctcatgtcctgattcaccaacccaaagattccccaaatcatccttcaaacaaacagcagtatgaccagcaaaagccccagtcacccatttctctaacgtctcaaaaccaccccatctacctcgaatcttcgacaccgccaagaaatcaccagaatgcacatcttctgggttaatcattgaccgccaaggttgagaccgtttctcaaaggtagcacccatatgtttcgtcaagaacgccaaattcgcattctgtccccaagcagtattggagaaaagaggtaacacatcaatcaaagatagcaacgtcccaagcattcctgatggcattagaaacactgaaacgccatgctccttcacctactcatcgaagaaatcaccatgaaaacaaacaccacaaaccctcttaagactataaagaagattaactaaatcaaaaacctacatattccaattcagctttctcttcccaagaatcaaagttcaaagtatgatctctagcagagaaatagtagtcccaagtgatcctgtatggcgttgcaaacacataaagatccatacatgtcaagctatgtgccttggatgtctgcaaaattagttcccaaatgttatcaaacaactcaatttcatccagaataacatacaatttcgaattagcagcaactacacaacagtctcctaattttgaatttgttaccataaaaggaaaaactttacgaaatctgagcatatgagcgttgaaagtataacactttaacattaagaagacaaattaagaacaaattgatgaagaagaaagtgaaattaaccaactttgagatgaagaacaccaccaccaagtccagggacgtcacgatcactaccggtgatatcaagacgagcttcattaccattaaagcaagcacctttccactcaatagatacattattaggagtaactgacccaataaaaaccggcaacaaatccacagcgttgtggaaactgttcaaaacaggccatgagacttgacgaggtagcatcggaagaacatcgttaacgctgaaaggaactttcagggattgacccaggtcaacgcaaaaacctaaccctagacataagaggaagaagagtgatgggttctgagacattcggatccacgaagtgaaattttgagactttgtttcaaggttttggggattttggagaagaagggtttcgtgttgttatggttgaagatgatgatccatttgggatgtttcagttttttttctctctgtgtgttttggattttttggaaaattggactttgggggagataaaatattgagttagttttggatgtggaagaaatcgaccaaactggttttagacttttcttagaaacaagaagtttgaagattctttgctttggtttcatcttccacgtagacacaaacttggtttgtgaatgaatatctccaagaaccggattttaccatctggttcagtttggttcattgttcaattgctcatgacatctgacaaagataattgcaaagtttcacttgaaatgactaatgctatatgatatatagcataatattcacctaagactacaatgattgtatgtatgcacttgatggtcctatccacataaataactacaacaaccaataacaaaatgatgtgacattttctacattcattgtatagataatgttggtccatacaccggaacagtatctctatcgtcgatccagaccataacagtgaaccattgagttgatcaataatgttggagaatttttacattgcgaagatgaaacagtttgagtagcaagggataaacagagtactctcctctactgccattggctgtctaaatggattcaactcaatctgcatttcaaagatacatcgttacattcatatcaatatgattctgaagaaatatataagaatttatctgcaaaacatcattttccaacaaaggttgattggagaagtggacaatagtgtgtctgttttgtgtggccccaaagatgaagaaaaaagagatgtttttgtctccttcaacttcattatatagtatatgtgtcgactctctattctacgtatacagttttgatgagacataagcctgactatatgcaggaggaacccacatatcaataaacatagacttgaaatagttaaataggacaatgaacctataatttagacttacaggtgatgatagaggttgtcctgtgatggttttaatgcaacaagcagccagatgacaagcttcttcacagtaatcagagaatactgctgggacttgtatctcctttatcagttcctgaaattattcacaccaacacatgaatgaataacaaacatatgctctctctgtgtatcctgggaactattggatgtgacattagctactggaaaaacgtacaatagttggcaaccagcttggatatgcagcgatgcctgcgtttggagcaatcactatgtgtggaggaaatgaatcctgccgagatggtcaatcagaaattattacatcttttaggaaacaaacaattcaaggtccacgaaaatggacattacatataagaacagtatagtaaatcattgttttgcccctagactagtagaaaggggtacctttgttatgtcattgtaacgatcatggtaaaaccctctacggagctgtaatgacacagccgaaaccaaagcaggtttgctcccggaattgagaattttgcttgaatttttacattcacattcttttcccatgcaaggggaatatctgcaaagggagatcatttctccatccctgttcatcgagaaagcaaatagagaacgatccatcaaattatgtcaatagttcaacacatacaaagaaaatccagctataatgttgtcactgaatagcttaaagaactctaaagaagagtgattaaaaggaaaaacatatctttactcttcctaactaaaatagaactagtgttatacaaagtaatcaaatagattgtggaatgcaggactcacatatgttgtggaacgtcaggtccaatcaaatctacataaatgcgcagaccagggaagagcgcttgcagctcagcaaaaacaccaagttgcccaagttccttctgaggcccttcagaagctcaaactatcagcaaatcatatatcagaattttacaccatagtggttctgatgattcttttgccaatattaagggactaaactaatataaaggaagtggaggcaattaacaaaaactgcctaacagaacaacgagaacatgatagcaacctcagagaggatacagttcctcaaaaagcagaagagttacagagtgaaacataccaagataatgtatacgaagttcatcacttatttggggagtcaaatttcccatcccaatggcttgaactgcatgatatatcgtaagtggctgaaataaaagcaagctctacgagtcaaaaaaaagaaaacctcaagcattctaatcatacttgaaatcacattactcatcagaaaaactgttattacccagtggagaagtagagctacaggtgaatctagaggtaactttctccactcgaaataatccttccaagtacatagctgtttagttattggagataaaggccctgtgtaatccaaaatcagaactctatagaaacaaactctttcagtaaaaccataaacagagaagtgaaaatgaagtataccacgacatggacaagaagagctcggcaaatgccacccttcaatattaaaactgtcagaaaaagatagtagtcagctcaaccaacaatagcttcaaaccaaaacgtgattctcattaagtaaagagaaaaaataagcaatgaaacctatcaaaagccaaagctccacagttacactcatacatccacattccaacacgatgtaatcccctcttgatgaagaacgagcacctagtctcatgtttttgactaacctaaagaacgaataaaccaaaaacttaaactttgagctgaatttttactaaccaaaaggcatttgattcctcactatcattcaaagtgatgattaacctgaattgtagcttcttctgtaaatgtaaatggaaaatcatttaaaagatcaacacgacgcatttgctcttctaatctctcacattcttccttgtgatagctccaatgcgaaatctacaaacaaaataaagatcaacaaattcaacaaggaacatcctaatttgcttatccacctaactacaagcgaccgatcaaatcatcactgtgaagaagaagaaggcttaagagagagttaaagcagaagttaaaacctgatgagagacggagcaataagctacagcaccacactgaccacacctccgcgtcggtggaccaacacaccgcgtcgcaaaaccacgcgcggcacactccatccgccgtcgacgaccaagacaaccgccgtttcttctcgggacgaaaaaagtattaaagaatctcggtaactcttaaggcccatttttctaatcataaggcccaatgttttcttatcgtaaagcccaattagttcttatcgtaagccacaattttgtttatcgcaaggcccattttgttctcatattaacaatgttaacctagaaaaagtattttgaacaaagaaaaaaaacccctataaaaagtattaaaaaggactgatacaataatgtatataaatatcctaaaagatcttaattttgtaaatttattgttgtatattctaaacccgcaatattagaatgatgatttagtaaacaagaaagacaaaataaataattaattttagctagaaaagatgaaataaacactcatgatttaagccatacaaatcgaagccccttgggttcagcatttctcaccaagtaaataccatcacctctggaaacccatttacgtacttgaccacatcttttattagcggctcctctgtatgctctccatatgttatacacactatgatgccttaagatttattcacgacgatttaatcagatacgcttatggattgccaaagatgatgccatctacttagagaaaaacaatggaaagcgagaacgcatgtataattggaataaaaattaatatggttttcatatatctaaaaaattggacatttgaagccttaataaattatactatgtaaaaatacttgtttatgaatgtaaattataataaattacgatttaattagggaaatattgactatatatttcacccaaatattgaatgtaaattttattttccaatacttttgcacatttaagaaattttcggatgtatttcctaaagaatattaccttttttgttttttaaaccatgcctttttgttttacacgttcataaatgcatgttccatacgcattaccataatttaatttgaacttaattttctctaggaatggtgatgatccactaccactatcattgatttcattccatattcctttgaccgactgaaattacgttggaaatagtatattttgatgaataatttatttactcggaaaaaagaggtcaagttattaatagtaagtacatatacattatcaattaagaattcaattgagttttaaggaaaatcctattaatttgtttggtattcggtatttgttagttctaaggaattgaatttcccgattatacatcattataacgttctcaagttccaaacttgcaacccacattttgtcgatattctcaaatgtgaattcattcaatttcccatagaaaacataaatttgcacttaaagttaacaattgaaatcgtatctaaatgggaatgtttttggcttttagtgttagacttccaaagcgtcaaaaatatttctagaaagagcacaaaaaataagcaacgccactacttttggacaaagtcaacgataacacacatcaaccgcaccagctccataaaagtccatctcacgaaaacgattctagtcaaactacctaaaacacccttatatttacatacaacccaatcccactaacaagggtattttcgtcaatcacaaaatttatcaccgacccgggaagaagaagaagaacagatcaactaatttctgctttcaactccacattaaaccaaaacctccaaaaagaatcatttatttaaattatcttcccgttttaagttcctgagatttttgggaattgtaaatttgaagaaaattaaacaaagacgtgttttcatttttttttttgtttcctttattgatctctctctatctctctaaatgagctaaatcgttaatggctgccatgtttaatcatccatggcctaatttaaccctaatttacttcttcttcatcgtcgttttaccattccaatcactttctcaatttgattctcctcaaaatatcgaaactttcttccccatctcttcactctcccctgttccaccaccgcttcttccaccttcgtcaaacccatctccgccgtcgaataattcatcatcttcggataaaaaaacaatcaccaaagctgtccttataacagcagcaagtactttacttgtagctggagttttcttcttctgcctccaaagatgtatcatcgcacggagacggagagacagagttggaccagtcagagtcgaaaacactttacctccgtatcctcctcctccgatgacgtcggcggcggtgactacgactactttggctagagaaggattcacgaggtttggtggtgtgaaaggtttgattcttgatgagaatggtcttgatgtgttgtattggagaaagctacagagtcagagagaaagaagtgggagtttcaggaaacagatcgtcaccggagaagaagaagacgagaaagaagttatttattacaagaacaagaagaaaacagagcccgttacagagattcctcttcttagaggaagatcatctacttctcacagtgttatccataacgaagatcatcagccgccaccgcaggtgaaacagagtgaaccaacaccaccaccgccaccaccgtcaattgcggtgaaacagagtgcaccaacgccatcgccacctcctccgattaagaagggttcttcaccatcgccaccgccacctccaccggtgaaaaaggttggagctttatcatcatcagcttcgaaaccaccacctgcgccggttagaggagcaagtggaggagagacttcgaaacaagtaaagttgaagcctttacattgggataaagtaaaccctgattccgatcattcaatggtttgggacaaaatcgatcgtggatcattcaggtatatatttatttcgaaagttagggcttttgcttcaatcaattgaaaaaaccctaatttgtttttgtttcttctcagtttcgatggcgatttaatggaagctctgtttggatacgttgccgtggggaagaaatcaccagaacaaggcgatgagaaaaaccctaaatcaacgcaaatattcatacttgatccgagaaagtctcaaaacacagcgattgtgctcaaatcattaggtatgacacgtgaagagcttgttgaatcactcatagaaggaaacgatttcgtgccagacactcttgagaggttagctagaatagctccaacgaaagaagaacaatcagccattcttgaattcgacggtgacacggcaaagcttgctgatgcggagacgtttctgtttcatcttcttaaatccgtgccaaccgcgtttacgagactaaacgcgtttctctttagggctaattattatccagagatggctcatcatagcaaatgtttacaaacgttggatttagcttgtaaagagctgagatctcgtggcttgtttgtgaagcttttggaggcaatacttaaagctggaaacagaatgaacgcgggtaccgcgagaggaaacgctcaagcgtttaatctaaccgcgcttttgaagctttcggatgttaaaagcgttgatgggaagacttctttgcttaactttgtagtggaggaagttgttagatcggaaggaaaacgttgtgttatgaatagaagaagccatagcttaacacgaagcggtagtagtaactacaatggtggtaatagtagtcttcaggttatgtcgaaagaagagcaagagaaagagtacttgaagcttggtttaccagttgttggtggattgagctctgagttttcaaacgtgaagaaagctgcttgtgtggactatgaaacggttgttgcaacttgttctgctcttgcggttagagcgaaagatgcgaaaacggtgattggagaatgtgaagatggagaaggagggaggtttgtgaaaacgatgatgacgtttcttgattcggtagaggaagaggtgaaaatagcgaaaggtgaagagaggaaagtgatggagcttgtgaaacgtacaacggattattatcaagcaggagctgttacaaaggggaagaatccacttcatttgtttgttatcgttagagattttcttgccatggttgataaagtttgcttagatattatgagaaatatgcagaggaggaaggttggtagtccgatatcgccttcttcgcagcggaatgcggtgaaattcccggttttgcctccgaatttcatgtcggacagagcttggagtgattctggtgggtcggattctgatatgtgagagtcaagatttgttatatgtaaatactaaatagtagaagcattttgggtattgattagcattgaaagatgttgaattgtttatagatttatcagtccaaagcattggacttgagtataatttgttccttgtataaataaacaattttgctttaagacctttccatgtttatgaacatgtcttctttaacttcacatagaccttttgtttacgtaagaactaataatactaaattgtttgataattctaaatgtgaaagtgaaccactatatagtgtgaacttggctttattgaattctttttaaaaaaatttctccagagctttagatgtaggagttaatattttcacctaacatagcctcttttttatgtttctctatcaactaacactaaatttgtggatgaagactaaattaacataagtttatctattaactaacaacctaccagtttgatgcttgtaaatatgaaacttcaacgttataaagactatatggtgtgaactttttatccatctttattgacttttaaaattttcttaatttgagtaaacaaaagcagaagctttttaaaggatgcaggagttgatttttgtatatgaacaaaacatatacttctcccttagacgaatttggagctatcattcttggtttcaaactttttaataatttgagctttaaagcaaaatggcaactttatattgatcactagtccacaacactttctctgccttttcctcaatagcaacgcgtagtcaagaagaagaacgtgtttaacatggaccaatcttgattaagataatagtatgatcaaatgcttatataaacacactaaaaaggaatcaaatttaaccattccacaaatcaccaacaaaatttaatgaatcatgtctctgcttctaaagatgttattattttccttattcttcttctatatggcttcaatttctcaatgctcagacccaaccggtggacagtttagcttcaacggttacttgtacaccgatggagttgcggatctaaacccggacggtttgttcaaactcataacttcaaagacacaaggaggagctggtcaagttctttaccagttcccactccagttcaagaactcaccaaacggcactgtttcatccttctccaccactttcgtctttgctatcgtcgcagtacgtaaaacaatcgccggttgtggactttccttcaacatctctcctacaaaaggcttgaattcagttccaaatatcgaccactctaaccattctgtttcggttggatttcataccgctaaaagcgataaaccggatggtgaagatgtcaacctcgttggtatcaatatcgatagctcgaaaatggatagaaattgttcggctggttactacaaagatgatggtagattggtgaatctagatattgcaagtgggaagcctatacaggtttggattgagtataacaactcaactaaacagcttgatgttacaatgcattctattaagatatctaaacctaagattcctctgctttcgatgcggaaagatctttctccatatctacatgagtatatgtacattggctttacttcagtgggaagtccaacttcttctcactacattcttggctggagtttcaacaacaaaggagcagtttccgatataaatctctctcgtcttcctaaagtccccgatgaagatcaagaacggtcgttgagttctaagatcttggcgattagtttaagtatttcaggagttacactagttatcgtcttgattcttggagttatgttgttcttgaagaggaagaagttcttggaagttattgaggactgggaggtgcagtttggtcctcataaattcacttacaaagatctcttcatcgccacgaaaggtttcaagaacagtgaggtacttgggaaaggaggttttggaaaagttttcaaggggatcttaccgctgtctagtataccgatcgcggtgaagaagatttctcatgattcaagacaaggaatgagagagtttttagctgagattgctaccattggtagacttagacatccagatttagttcgtcttcttgggtactgtagacgtaaaggagaactctacttggtgtatgactttatgcccaaaggaagccttgataagtttctttataatcaaccaaatcaaattcttgattggtcacagagattcaatatcatcaaagacgtagcctcgggactctgctacttgcatcagcagtgggttcaagtgattattcacagggatattaagccagcaaatattcttcttgatgaaaacatgaacgcgaagctcggtgattttggacttgcgaagctatgtgaccacgggattgactctcaaacctcgaatgttgcaggtaagtttgtgtttttatgatcattataaacaatcaatcaagatctctggacttattgagggttttgtgttgttactttggacgcaaggtacatttggatatatatcaccggagctgtcgagaacagggaagtcaagcacaagttctgatgtttttgcatttggagtgttcatgttggagattacttgcggaagaagacccattgggccaagaggatcaccaagcgagatggttttgactgattgggtactagactgttgggacagtggagacatactgcaggtagttgatgagaaactagggcacaggtatcttgcggaacaagtaactttggttttgaaactgggattgctttgctcgcatccagtggcagccactagaccaagcatgtcaagcgtgatccaatttttagacggtgtagccactcttcctcataacttgctagaccttgtgaattctcggataatcaatgaaggatttgataccttaggtgtaacgactgagtctatggaagcgagtagtaacgtttccttggtcatgacggaatcgtttctctctagtggacgctaactaatgatcatttatattgtagggttgagattgtatgaaatggttgtttctctgtttccattaattaatagtaacaagtgagaattacatagattgactctaattttaaagaaagagtaaaatcaaatctttgcaaaataactaatcaaaaattaaaacagctagggttgtctccaaatttagacgccttggtctcagaacctggctcgaaccgcaacatggttatatcgcacgcatagctcataactcctgtggtcccttttctacaatccgttagaaacaactgcgatccgaacttcacttctctcttttctttgatatctttgataatccttttcctaatcaaaccgtcaatatcttcttctactgaaaccctaatttgttgagctgtgccagatttgagatcgatatacctattttatatgcaagcaattttttgtcagaattataaacagttttaaataaaatactataagattaatttataatcgaataaattatatataacctttgtgcagatgaggtaacaagattaatagtcttgtaaaacaatgaagcttgaatgtctccttggagacatatataggcattaggaaggttactggggacccttatcaataaatcccaatttgcactgagacgagtttgtgtaatattacgcacagtgaaatccatagaagctatttctatattcggcgcgacaggagtttcttggttcgctagcaaaccacaagctagcaatattgcccaggccaaaattagtaaacctagtaaccggagctcgccggaggtgtctcctgatgttcttcgtgtgtcactcattgtgtcacgattgaaggaagatgattgagaaggtttaataattattctcttgtttagaaatctggttttatatgaatatctaattgataataatttttataggcgatgaatatctcttaataatacacaatttgcggcgatgaatatctagaatcaaataaatatgcaaaaaaagagaggaaaaataacaaaaacgtaaaggggaaaaagaaaggaaacatgtaaaaagtaaagtattggtaaccagaagccgaaaccagaagtcgaattagaaacgaaacaaacattttgtcttcaactatttgtaacagagtcgcttgattctcaaagcattggtaagtctctaaatctctctttttcttgtgtataaagtaatcaagaaaggaagagactttatgccttaaaattcccagagactatgttgcatactttattttaaaagaacggttcaatggcaaaatcgaattttataattttcagaaatatatttatgttgctggctcaatggtattgaatgattctctgtgttgactctccctaaagatgttttcttggcaattgtcatgaatattttggttgtgttatcttatcaagattatggtgttgttgttgtttctggtactgttcttcgtccccgagagcgtcgtatgtcagagaccaaacccaaacggtgtagagttcaacaccagtggaaatatgtacaccagtggatcagcatatataaacaacaatggtctgatcagactcacaaattctacaccacaaacaactggtcaagttttctataatgaccaacttcgattcaagaactcagtgaacggtacagtttcttccttctccaccactttcgttttctctattgagtttcataatggaatatatggaggatatggaattgcctttgttatctgtccaacgagagatctgtctcctacttttcccaccacttaccttggacttttcaataggagcaacatgggagatccaaaaaatcatatagtagctgttgagctcgatactaaagttgaccaacaattcgaggacaaagatgctaaccatgttggcattgatatcaatactttagtttcagatacagttgctttagcgggttattacatggataacggtacatttcgaagtctcttgcttaacagtggacaacctatgcaaatctggattgagtatgacagtaaacagaaacagattaatgtcacacttcatcctctttatgtccctaagccaaagattccacttctttctcttgaaaaggatctttctccatatttgcttgaacttatgtatgttggattcacttcaactacaggggacctaactgcatctcactatatattgggatggacgttcaagatgaatgggactactccagatatagacccctctcgccttcccaaaattcctcgttataatcagccatggatccagagtccaaatgggattttgacaatcagtttaactgtatcaggagtcatcatactcattatcttgagtctcagtttatggcttttcctgaagaggaagaagctattggaagttcttgaggactgggaagttcagtttggtcctcataggtttgctttcaaagatctgcatattgctacaaagggtttcaaggatactgaggttcttggtaaaggaggatttgggaaagtctataaaggaactttaccagtgtccaacgtagagatagcggtgaagatggtttctcatgactcaagacaaggaatgagagagtttattgctgagattgcaaccattgggcgtctcagacatcctaacttagttcggcttcaaggctactgcagacacaaaggtgaactctacttggtgtatgattgtatggccaaaggaagtcttgataagttcctttaccatcaacagactgggaatcttgattggtcacagagattcaagatcatcaaagacgtagcttctggactttattatttgcaccaacaatgggtgcaggtcattatccacagggatattaaaccagccaacatccttcttgacgctaatatgaatgctaaacttggtgactttggtctcgcgaagctctgcgatcatgggactgatcctcagacctctcatgtggcaggtacctttaaatattctacttatttgtattggagacttatagccccaaaaaggaacttctcactcaaaatgttgttacttggaaggtacacttgggtatatttcacctgagctctcaagaacaggaaaggcaagtacaagatcagatgtatttgcgtttggaatagtgatgctagagattgcttgcgggcgaaaacccatattgccacgagcatcacaaagagagatggtactgactgattgggtgctagagtgttgggagaatgaagatatcatgcaggttcttgatcataagattggtcaggaatatgttgaggagcaagcggcacttgttctgaaacttggcttattctgttctcatccagtagcagccatcagaccaaacatgtctagcgtcattcaattattggacagtgtggctcagcttcctcataacttacttgacattgtgcaaactcgagaagttcatcgaggtactgaaatctcaggtgaagcagctgattctccagagtcctgttccatcgctcccttgaccttcactgaatcctttgtctctcatggtcggtaaaagatttaaacctataaggtctcgcaggttcttgatttctattgaaaatgtaagtctgaagctgattctaataaatttgcaagtatataagaagaatgtatattaaaaaaaacagtacttccacgagaaataacaggattgatattcaagtatgttaataacatcatcctcacgtttatagtctacagactctatacacatacattgacacaagactgtataatacttacttctccacaaacgtaatgacttctctatataacaaacatcatttgaaagtttggagatatttgatctttttgctgaaaaatgttggtggagcccttagccttgtgcttcagaagatcagataaaaacaatagtcacctgttacatatcaaagttcgtgaaatgaagactgctacatcatagtactttgtctgaatagccttttgggagaggtccttgaatggggttttcttttggatttagactttgcctccgagttttgacattgcttgcttctgcctgatatcagacaacaatgctcagagatcatacactaatgaaagatatgcaacacggttttcttctcagttaataccttcggtttcgcctgtaaatgtatcctctctacagctcttgtgccaagcctagaaggctgaatttgaagaagaaatattagctatctgaggaattgttaaacttgttatatcagaggataaggtgaacatggtttggcttgctcataaaacatcttacgtccttctgtttctcggctgtcccgttgctttttgatacaacagatgaagaacggtgagagttaggaccttttctctccgtgccatctgattttgcaagcctgttacaagaaaacagatttaggattcaaacaagacacgatgagtaatagaaaactctagatggtgatgcatgtctctgttatacctgacatttttctgaccagttgtacctaacctctgaacagcagttgcctttgcaagaacctggtgtcaaacattggaagtatgaatcgatatttagttataaaccagtagaatctttatcacttggtgaaacactattagactatacctgctttggagctgtatcttgcccatcatcagtagatttcatttggtcgaaactcttctgaaaactcttaaatgcacgtctaacgatgtctttatctcccattcgttccatgatcaacgattttcttgttgttggaacagcagtaggatcggagaccgactgatccacattgagagaaatgggcaatgactttggagcggtttgtttctttctcagtaaagttgagacactttccttctttactgaagagcgagaagtagacattgaacttattgttgaagctgacttagacactcttggagttgaaaaccctggaggttttaaaacaggtgatgctgctttatttgttgcctttgtcatgcttttttccttgcttggttgagttttcctaccacttacaaccttgctcgttaccggtttcttcgtcacctggttagactgtaagacgaagacacagtcatttaaagacattacacataaaactatatgaggaagcttatggtgttttaccttgggagaggctctcatatggttagttcgcacatttttatcagtcttcttgattggattatgatctttctctttcttcgtctccttcattagtgtttcactcatttctccagtatcctttgatggaacatcttcttttacttcttccttcatacaaataacctcttctactttctctttatcctccacttgaacaatctcttcaagtttctcctccaacttcagggtactcagatcatccccagtatcaaccgagcttcgacattccttgaaatccatagtttcttcaagaggcttatggttacatgtctcattcacttcagtaacaatgacggtcacaagcttatcttcttctgaagtactttcaccgttagatccataaccggtactaaactcgatcatcattgactcgtcattgtcactatcgtctgttctttcccggttctgaatattcggcctgaaagatgcattcctctccaaaagtttctcctgctccatgatgatatcagctctcctctcagcaatcttcttgtaatgtgattcgaaataagccttcttctgagctactgatccagcagttgcacacttctccacttcttccaaatacttgtttggagaaaaagatgaaaacttctcccatgaaagtgaatcattctcaaacttaccaaacgaaacagacacttgcagttcttgattcgatgaagccgcggtcgttatctgtttatcaatccacaaacaagtcatataacacctaactaactatgacaaatcaagaaaccacacaaatgcaaaacagatcataggacattgacagtaatgtcaataattaggcacaaacacatcaaaatgacgttggagtagacaaatgggtattaccttatcttcaccactggcaataccaacttccatatccaccattaatgctcaccagaaagaatcctaatccacacaaaaccaaagaaaattcttatcactttcaaacttgaacaaagccagaatcaacttggatttgagctaaaactataccaattttttagcatccaatagtagcttcactgtaaagcagaataattgtagtaaagagaggaaaaacacatataatcttggtttagtaattaatagacactttcaacttcagcatttttcaacctcttggtgagcaaactcagattcttcttaaaaaaatataactaattgagagtgagcttcaataattgaataagcaaagagagagagccaaacactcatcaatgattgacactaagaaaagttatcattacaattccaaaaagaaaaacaaaaaagagaatctagtggcaatcttgtaagattacctgaaaaagtgaagatagcccacacaattgtgttacttccaaaataatgatggacacaaaaagtagtaacaagtgaagattcacaaatacatttcaaagttggaaactttgtgaggaaaaaaacacaaagaggacctatcaagaaaacttataaggagttgttaattttgggtcgaaaaatcccaattacagatttgagtgagagagagaggaagaaaaagaagaagaagagatcagatcagatacaaggatgagaatgaagacaagagacagtgggacctttgtcggaagatggtaagtaagaaagtgttgtactaactaaactattaggcggggacaaaagcgattattaactagtttaactgactaatgttgatagttaaaaatagtcgatattgataacaatcaaagtcgaaggtactttcacattcttttactatatgaatgtcatatacaaacattaaaccaatgcaggtacggacatccttttcacaaatttctaatgtgtgatttaacattttcattatcgttttcaaaaagcatttagaaacgaggaatacgtacatcgtattacttaacaggtcaacccaatccagcccactaacagcccaaatcttgccgtttaagatgagttattttatgtcttgacccaaaaaaaaaagaagatgagttctttgaactttgaagtttgactatggagcagacttaaatatgtgaacagttacatacttacaattgtgtgtccagtttgaaaacttatgtttccgaggagccaagcctttaatgtctccattcttcttcatttatctcacactgcttcatcattgcggacagattcaaataactcttttctttaccatagcaagtaacttctaaccattctaagatgtaatcttatatgtaatctacaatgacatagtttaacaaacttggggtttatttcatgctaacaacacactcgctgcatattcttgaaaagactctaaatacagaaaattgagatcaacataaccatttagggaaagaacacaacaaaatacaaattccaaacaaagaattcttctaactagtcctcatcaatagcttctacaaactcttctctcacacaagtcaatttttacacaaccaacagtcaaaaaataaatcctcaacaatgtatttgtaataacccaaaactacaataacaagtaaaaagaatgttgttgacttacacaaactcttcagaaaaagcttgaatcttctgttaactcagacaaagaagagaacccgaacaaagactgatctttagctctttcaatcttatgctcatataaatcatacggttcccataaatgatccaacggacacggtctcttctcatcaagtctcacccatggcttacctttaccactccaatgcaacaaactcactggtcctttatgcaaagacctacaacttcctcgtacattgtctcctcctaaaccatgttggttccacctatgatcaattgcttcaacgttccctgcgaagacaagaagaaacggaggcaaagaacccaaatcgtagattctcttcttcttctgtatctgcatccaagtttcaagcttttctctgtagtttccttctctccatctaactagatccatcaccatcacacccgtgttgaaataacaaggctttcgacccgagaagaaaccgggtaaagccgggtcggaccagaaacctgaagtgaagtactttgtgaagttagcgtgacaatactccggagctccgatgattcttgaccctgtcaaactcgtgttccaaagctttgttatgtcatcgacgacgatgatgtccgagtctaggtaaatgactctgtctacgcatggatcaagaatatctccgaggtagttccgagcatagttcaatggattctctaaagcttgtctgattgaagaagagataaggttgatcaccgtatcttcccggaaaatgtagactttgaagtttagcgacgggaaagtagatcggacgagttgactcagaacgcgtggactcgccgggtcaaactctgcagcgatgagatggaagaagacgttttctggacacgacgcgtggcggagcattgaatgtacggctgcgattgagccacgtaagtactccgagtcaagcgtcatagctacatgaactaacgaagcgtcgcaagacgacacgaagttttctctgttcaacgattgagacacgcactccttgccgtttctgtactccggagcttccacgaacgaccccagatcaaagccatttccgacggtggcggatacggcggtgagtcttcccggaatcatccgtataccgacggaaaacagtggaataaacaccagaaagatagcaaacgctaaaacggcagatttcatcggaaaacgcaaccgcattttcagaaaacgcggtttctaaagtggattaaagatctgtcttttattccgctagtggattagcattttccagaaactatgaagcttctggaaataaataactcaaagagttaaagaagtgaagaaagcaagaagatgaagcagaagaaggacaagtctctcttttatttggcttaagagagaagtttggtttacacgcgctttcacacaaagcgcgtgaatagttatgtgggtttttagtcgttttgaatgatcaatcccaacgtaattacctattctaactgatgggattaattgaagatttcggtaattaattaaaattttattatctgtgtgttggtgtaccgtaagagtgaaatttaatggtggcttttggaaacttgtgataggtttttgccagctgtgaactcgatggaaacagctggatgatgttttgtcttgaaagtttgtatgggctcgataaaaggagatcgacggctgagactaaacgatgagaagccttttgagtttttgattggtttgatcaaaccctactttctcacgtgcaccacacgcttgtttttggatcagtaaatttcttaaaagtaaatggattggtaaccacaaataatttagatttctagattttaacagattgttatctaaatatcgggaaaaagtgaatctaaaaggtatttttattttgtgttgatcttttatcaaaaaaaaaaaagagtacattgttatgtttaacatttttgttgttggaataacgagtaagaagcgtgtctcactacgaatattctcgtgtgtggtgccacttaataatgttttgttttcgttattgtcgacgttttgtagtgttgagtgtgcgactagcgccactcaataacattatcacaaatatattcatttgcactttagacttaaatccatttcgttagtgttgccgcgtgcagtgtataatcgtttgattcgaatacgtaacgatgaaatctacttatatgtttttatacggagaatacatctccttttatttgtgtatgtgatggaaaatattctgtaatatttaatttaagataacgtcgccatgtttagtgtgactgtgtgagttaactaatgttaggtttcaactgggtctatcggctaccaaatactactaaggtcacaaaggaataaagaaccaaccttgttatgattacttgagttctttgcatttactattagcactacaatttgtccgccatgttcatgccaaaatccccaaccaaacaaattagaagcatgtaaacacttccatctatgtgtttattatttcttaaaattatgaacaaatatagtaaaaaaaaagatgaagatattagtagtaatagatcaagcaaattaaattgaagttaggtggtggaacaatgatgtcgttttggatacggacggagaaggtagatagagagagtcatagagatgcttttctctttattcgatttggtattataaaagtgtttgtttgggtatgaagatattacgatttacgaatttcaaaactatgctttgcgtggcgagtacaacacgggtttattgagttttgtcttcacctctccacttgctttagatttttactacattccgacagctaagtagaagacaaacaaagacagttgtagtaataagcagagctctttgcctttgcttcttgtttctgatgttatcctaactttgaggcaaaccaattttatgcttcattttgttctaaaattagactttcacaaaacaaatatattttcatttttcataggaccaaaaacgtcctcatttatctgtttgttgtctgtgggtaagaaaacaacatttggagacaatagttttcccttcaattaaagaatcgacgttttgataacaatcccgaaaagttgccaaaaatggaatcgagaaactgaaacaaaaaggctttacatttgaattgagttgagaaaactaaaatgacaggagcaagttttagttgcactgtcttggatttattgaaccggattctcctgcatgagtttgcggttataatgaatgttagagaggagatatgtgatggggaataatcgcgactatagtttatggaaagtgttgccctcagttcctttctatgctccaaaagactgcgaattgcaaagaggaaatgcatatctcaggagttgagtggaggaacatatccaagtgcatgtagtccaaaggatatgaagaagaaatgtaagttaactcaagctccgaaacctttttacgtagatatttgtgaaaagctcagatggatccggaacagggctctcctgaaacaaaataaataacgcatagactaagttttggtggtgattggtacacaattgtagttagagatgtaaaaatctcgctttctttatcttggctttagctacataaacctctataaattaatattattgaaaccatgatattttattaattttttttaaaataattttaattcataaaattttagaaagaaatcaattgagacaattttatcgaaatacaattagcgttttggatgttataaattttgtagtttcggatttgaaattttaataattagaagactttgttttcgaaaataaattagacaataaaattacaaacaatatacgtgaattcattttgataggtgaattcagataaacaaactatatacataaattcaaaaatttaattaataatctcaattatcgtatttaatagctagaatattatcaaaatgaaaatgatgcatatttaaaaattaaatacttacaaaaaatcttgactgtttttatgacatagttatagaatatatagtctttgccaaaaaaaaaaaaaggttatagattatactacaacactttaatttaaaaacacattagaccagttattttattcaatacaagtttgagatgggttgtaaggaattttaatcctttcactaaaagcataccttagtatatcaatatgcaaatttatataattattaatgagaaacacgtattacataggaattctaaaaaaaatcttattatcttgtcaaattttattctaatccaatttgagagctaaattttttattaatttataatattattaatttatggaatattaatttacggagtttctattgtagtcaaacaaataataaatcttgtatataacgttgaacttgacctgacacttacgaggaatctttcttgttttcaatgataattgattacatgtttttcgtttgtttaatttattataaaatattaatgatagataaaatgacctatatgtagacatgaagatccatattttacgggatctaaacgcctataagttttgtccttccacagtccaatagaagttcaaaaagaaaatggaggccataacaaaatatggatcttattttaacgttcgtttccttagtcgtttatgttggcggctaaacttgtcctcttcctaccactaccctcttcttaaatcatcactgtcattctctagatttcaatctcccaaaaagttgtgcctagttcgagcaacgacgaatcctacagatgataactcgacgactcgttcatttactccacatccaccaagtctatggggtcatcactttctctctgcttccgtgaatcaaacggtatataagattttatgagaacccttaattagatatactaagggtatatatatagtatattactcattttacttgatagagatcatcaaatctttgcaggaaatggatgatctttggagacagatcgaggcacttaaacctatagtgaatgccatgctgcttccttgtaacggtgctgatgcaaagaagataacttgtttcatccatacgcttgttagtctgggagtctcttaccattttgaggaaaagattgttgagttcctgaaggacgctttcgagaatatcgaggacatgatcatcgattgcaaggaagatgatctctacacggtttctattatattccgggttttcagattatatggtcattacataactccaggtgaggatctttcatctttattacggaactaactgacttggttggtttatgctccgttccgttgtttttaagtggatgtgtgatgtgaacattttgaacatgtttcagagttgcatataactatttcatactacttttttttcttaatatttcatacttgcatgtgtgtagatatattcaacaggtttaaaggagacgatggaaattttaagaaatgtctgaatgatgatgtaagaggtatgctaagcttctatgaagcgtcacactttgggacaacgacagaagatatccttgaagaagcaatgagtttcacacaaaaacacttggagttatttttggtaggcgagaaagccaaacattatccacacatcaccaagctcatacaagctgctctttatatacctcagaatttcaatttggaaatattggtggcaagggaatatattgacttctacgaactagagactgatcacaatgaaatgttactaaagttggccaaactcaactttaggttcctccagctgcaatacattcaagatctgaaaacactaaccacgtatgtatattcatttatatagatgcttcatatatatgtatattttctgaaagttttatcgattaggtgtatgtatgcagatggtggaaggagctagatttagtatctaagataccagtttacttcagagagagattggcagagccttatttctgggcgactgggatttattacgagccacaatattcagctgcacgaatcatgctggccaaatccatcattttagtggacattgtggacaacacttttgatgtatatggtactattgatgaagttaagagcctcgttcaagccattgaaaggtacgaactatatacgatcatttgttaggtgctttgtaatcacactcatggtataaacgaaaaacgaaaaaagttacaaagtggaatgaatttaaaggattaaaaagtcatatttaaaggatataaaagctcaacatctaggtctctttatattgttggaatgttggtgttctatttaattataaatcattagatgtgatccctaataattgtatggatccaatattaagtaaaggtgggactccgacgccgtagatgtcctaccggactatctcaaagtcgtcttcagaacaacgtttgacttgtttaaagaactcgaagaatatgtgagctctgaagcaagatcttttactatgcaatacgcgtatgagcaggtactgtttcttcatctatttcttaaatctaagccaaattattgcatctataaaaatagttactatacaactaatgttttaaaatgtctccaaacaacaccattctcttatatgagtaaaacaataaggagagcatttggatgttggaaatgttcattttctacgtggtatttttttcctagatcatttagctccacaaattcagccaaaaaataaaatatatatctctatattaaacgaagaattgaaggttatatatagttcgtatttaatataatgttttgcagctaaggatactcatgaaaggatacctgcaagaagccgaatggtcaaatagagggcacctgccaagccatgaagaatacatagaggtcggggtagcttcgaccgcaggtgaagtgctgctagcaatgaccttcatccctatgggagatgctgcaggagtcggagtttatgaatggctgaggtcaagaccaaaactgacccatgctctttttgtgaaatctcgtctcagagatgatattgctacctataaggtaacagaagtcctatatatatatatatatatatatatatatatatatatatatgtatattttaaatgcaaattataaaaataaaatgctaataaatcttatcgtatagtatttcacgtcataaactactttttagttatttgattgataattttgacatgatcgaaatatatgatgaatttgcatcaggaggagatgaagagaggagatgtttgtaatgggatcaactgttatacgaagcaacacaaagtaagtgaggaagaagcgtgtattgagtttgagaaaaagactaatcacatgtctaaggtcatgaacgaagagttcttgaaggcagccaaatttataccgcttcatattctaaggcctgttttgaattacggacgcttagcagatgtgtgctataagtatggagatgggtacaccttcgctggagagaagatcaaagattatatcacctctttgtatgtcgatctcatcactctttaagagtcttcagagtttgggatcacgtgaatggccaagccaaatttgtatccgcagccgcaacccaaaaataagttgtttcagtttaagttgtctttgttttcttggttgttagtctgtcttgaaaaccatcttttaatcagtaataaagcttgtcattagactatcaaaactaacaataatccgaataacaatctatgaatacgtagttaacacttatagtagtgggatttggctttctctgcagatgtgcaattatctatttttttattagcaccgataagaaaaaaaaaatattaattttttctttgttattcgcttagttaataatattaaaacgggcattcttcgaaatatattgtgtacgtaagtgacatcaagcgggtcaataggaacttttcgtagaaaataatccgtttttacatcagacaaaaaaatattcatttatctgagaaaataataattaattgggtgtaatatccaaaagccaaaaaaaaatcaaatcttgaaatgccctgaaaacatgaacactcttcccgtcgtctctctcacagcttcttcttccttcaaattcttccattttccttctctgcaccgttctctctctcattccccaaacttctccttcaccaaatcccttatcctcaatccaaaccacctctccttcaaatccaccttaaattctctttcaccgtctcagtctcagctctacgaggaagaagacgacgaagaagaagaagaagaagacgaagatgatgatgacgaagctgctgacgaatacgacaatatctccgatgaaattcggaatagcgatgacgacgacgacgatgaagaaaccgaattctccgtggatttgccgacggaatcagctcgggaacgagtggagttccggtggcagagagtggagaagcttcgtagtcttgttagagattttggtgttgagatgattgatatcgatgaactcatttcaatctacgattttcgaatcgacaagtttcagagattggctattgaagcttttcttagaggttcttctgttgtggtttctgctccgactagtagtggcaagactttgattgctgaagctgctgctgtttccacggtggctaaaggtcgccggttgttctacactacacctcttaaagcactctctaatcagaagtttcgtgagtttagggagacatttggggatgataatgttggtctactcacaggtgactctgctattaacaaagatgctcagattgtgattatgactacagagattctccgtaacatgttgtatcaaaggtattttgcaactgcagctctctctgtgtgtattttatatggtttgctcaggagcttctttttaacctcaatttttgtgttgaaatcttttttagtgttggaatggcttcttcaggaactggactttttcatgttgatgccattgttttggatgaggttcactatttaagtgatatatctaggggaactgtgtgggaagagatagtgagttttttttcccactgtttctcttctttcctccaaaggctttatctgttgagtgtttctaagttggtttctgtgtttcaaatacgatcaggtcatttattgtccaaaggaggttcaacttatatgcctatcagctacagttgcaaatccggatgaattagctggttggattggtgaggtgagtctgtggacatttttcctataggaatagcttttctttatcgtgttcatatcataaggagttataacaatgtacgtagtgccttgttcatcgtctcatttatcttctattgttaagcaacttatatattgttttgctgatgaagtatctcaatttctagtaatcttgtactaatacacggttatttaagatgctttcgtgttttgttctcagatacatggtaaaactgagttggtaacatcgacaagacgcccagttccattaacttggtacttttcaacaaaacattctttattacctctgcttgatgagaaagggataaacgtgaataggtaactggttcaaatctgtacttttatcaccaacatttattgtaaaatctttctctttgataataattggaggatgctttttaattggagcaggaagctttctctcaattatttgcaactgtctgcctcagaagctagattccgtgatgatgatgacgggtataggaaaaggaggtcaaagaaacgaggaggtgataccagctacaacaaccttgtgaacgtaactgattatcctctttcaaagaatgagataaacaagattcgtcgatcacaggtcttacattatgctttctaacaaccctaacaaactaggcatttgtcgtttcttatatatttgaatatgatttttaacttctcatgataatttaatgactgctgagttttgatttctaggtacctcaaattagcgacacattatggcatctccaggggaaaaatatgttaccagcgatatggttcatttttaaccgtagaggatgtgatgcagctgtacagtatgttgaaaattttcagcttttagatgattgcgagaagagtgaggttgagttggccttgaagaagtttcgcgttctttatccagatgcagtgagagagagtgcagagaaaggactgcttaggggaattgctgctcatcatgcaggttgtctacctctttggaaatctttcattgaggaactttttcagcgaggacttgttaaggttgtctttgctactgagacacttgctgctggaataaacatgccggctagaacggctgttatctcgtctctttcaaaaaaggctggtaatgaacgaatagagttgggtcctaacgaattgtaccagatggctgggcgtgctggacgcagaggcatcgatgaaaagggctacactgtgctggttcagactgcttttgaaggcgctgaagagtgctgcaaacttgtctttgctggagttaaacctctcgtgtcacaatttactgcttcatatggcatggtactgaatctggtagctggttcaaaagttactcgtaaatcaagtggaactgaggccgggaaagtcttacaagcagggagaagtctggaagaagccaagaaattagttgagaagagttttggaaactatgtgagcagcaatgtgacggttgctgcgaagcaggaacttgctgaaatcgacaataagatcgagattctgtcatctgaaataagtgatgaagcaatagataagaagagtaggaaacttctttcagcgagggattacaaggagatcactgtacttaaagaagagctacgggaagagaaacgcaagcgtgctgaacaacgaagaagaatggaactcgaaaggttcttagctctaaaaccgctcttaaaagggatggaagaggggaacttaccatttatttgtttggagttcaaggattctgaagggagggagcagtcagtccctgctgtttacttggggcatattgattcatttcagggttccaaacttcagaagatgatgtctttggatgagtcttttgcgttaaacttaatcgaggatgagctggcggctgatgaacctggaaagcctaatgttaaaccgtcttactatgtggcccttggctctgataactcatggtatctctttactgagaagtgggttaggactgtctacagaactggtttccctaacattgctctagcgcttggagatgctttgcctcgagaaatcatgaagaatctcctggataaagcagatatgcagtgggataaactagctgaatctgaacttggaagtttgtggagattggaaggatctctagagacatggtcctggagtttaaacgtacctgtcctaagcagcctttctgacgaagatgaggtgttacatatgtccgaagagtatgataacgcggcgcaaaaatacaaggaacaaaggagcaaaatttcgcgtttgaagaagaagatgtcccggtcagaagggttcagagaatataagaaaattctagagaatgctaacttgacggttgagaagatgaaacggctcaaggcgagatcgagacgccttataaaccgtttagagcagattgaaccgtctggttggaaagatttcatgcgcataagcaacgtgattcacgaaagcagagcattggacattaatacacacttgatatttcctctgggagaaacagctgctgcaatccgaggagaaaacgagctttggcttgcaatggtgttgcggaacaaagccctggtggatctcaagcctcctcaactagctggtgtatgtgcaagtttagtttcagaaggcataaaagttcgaccttggagagacaacaactatatttacgagccatctgatacagtagtagacatggtcaatttcttagaagaccaaagaagctctcttataaagcttcaagagaagcacgaggttatgattccatgttgtctggacgttcagttctctggtatggttgaagcttgggcttctggattaagttggaaagaaatgatgatggaatgtgcaatggacgaaggcgatcttgctcgcctgttacgacgcacaattgatctcttagctcagattcctaagttgcctgatattgacccagtcctgcaacgtagtgcagcagctgcagcagatatcatggaccgtccaccaattagtgagcttgccggttaaagtgaaccccacattagctctgtctttagtgagacccattggcaaaaaaaacacaagagcctgggatgtgcaagaagtgcatatgtaagaattggggatacaagaacaaatttttcattcagatgattaatgttggaaagaataggagcaacaaagaagaaattttaattaatgttacaacatacaaaatgcttatatacacaatgggaaacaagacttcaaggcttgggcagttaatccgtttagtattccttcgattttccccctccctccctttttattttctgtgagaatacaacagggaccagaggcagtaacagaagtaagagccatcttacatttcttctcttctgacaaagctcaatgctgagtatggcaaccttttatctctcaaaaagtgcgaagttgctctattcccgagcgttttctggtagtaagtgacagatgtcattgaccggtgagaagtttttgatatctttgtgttctcctttgcctaattaaagaaccactgcaaacagaatcatgtgcgaggggtaaaccgctttggtttaaaagtttcctcctcttagcacgatgcaacacatcctcggtgtctaatacataggagacctgaaggaaacaccagacaattctttttaaaaagacgagcttaaagtccttatcatggaaacgcatagtggtgtaagcaggaaaaaaggcactgtacctttgaagaactgcaggttatcttacattccaaaccattaataatcttaacttcatccgtggtgcagagttcatcgtcaccaccatttttacgcttattcctgaaaggaaaatagtatctgattagtgcccctttatctttaaaaggatgggatagcctttagttaattttcttgactttaccgtttcaaatagattcgaggattctctttcgcattaggttgataagaaaggaatacattgtggaggtaagctgcaaaagttgggtccatggatatggatgtcacatcaggcttatcatgtccatagtccagaagctgaatagagagtttgcttggtgtcgattgttcctgcagaataaaagcacaaagatacatatattaagaagtttccttgagcttgcttggtccaaaactgtgctctagtaaataattcttacacattcaatgcggtatatatcctcatcgggaagaagcacaagagcattttcgtaataaacagcatccagaaacttctcaggctttctggatttctcataagcataaagctgttgtaatttgttgtccatctcatcagctgctactgcttggagctggaggatcacattggtcagttggatcatatgtgacgactaaagagataaagaaggtaacaaaacatcaaaagaaaacctacatgcttgatgagcttatagatcagtttgtctaatgtgaagagaacatatgactgggtcccgataattgctcggcaatcatcttcgaactttgaattatcggatgtgccatcgagcaaattgtagagagcatccatgattctgttccaatacagaaactcgatgtataagcaacaacacatatagatgcgtcctgtggtaattggtataaagaaccgcaaaggaaagtcacctggcgtacgaatcagcggggtttgttggatttgaggtcttccactttctatctggagatgatgaattgatttttgctgataatattctgtcatacaaaatctgtatacagagtaaccacaaaaagttagcctccagaaagattccagcgtcattgatttgcagattcaagaatgatatgtttacctgatgaagcctgaatagaacataaaaagaatcattcccataaaagacttgtgagttcttccgagaatcatcgttgtccttatcgtacaaagctggagggacatactttgcaagaggtttcacatgtagcaggttttttactgagatggacaacacaggcatatctccttcagtatcatcatggccatcagacataccttcttcagcctcaccttcactttctaccttattatggtctatatcatcttcgcgataacaatcttcaccatcaccagagtcagttccagaaacatcaccgttgtgagatgtgtttccgctaccatctgatgatcttggagcacttgcatcatctgcagttgcatcattctccttacttttgctgagagcctccatgtcattctctccatgaactgcataattatcttcttcaaaatctcctgttggagaaagttcaccctcctctctttcgactttggcttccccagcgaaccattctgctactgtcccatttggaattacagggttgtcgccaatctgtgggataagtaagtagtttatcactttcgttgataaactcaggactgaagtattttatcatctaaagactgttcagctcaacatttcaatatatgcaataatacctctacgcgtggcccatttacgtaatttggcttcaactcctccgttccactggttaatgcaggttttggattactattgctaagccctggcgagtataaaagaaaaggataccattcttcatctaaaaaacaagaaaataatccatgataactaccaaacaagagttaaactgcttacccgcaacggataaactgctgatttttccattcctttgaggtaacaatccatccagaggtagtgcatttgagttatgggcacgttcaatagaaacagcttgtttggtttcggctctttcgtcaggtgtggtcagattcttcggcattttatcattctgagtgttgtcacatgataacaaggcatctgaggtcttactagaagtaacatctttatccaactcactagcttgccgcacttgattactttcattgacttttcgagggccatttgaccgcatagagttggcaatactagctccattttgaggactgacagcatcttcttggtcttctcggtcatggtttgtagacttgacagcatcttctcggtcttcggcaccttgagggcgagaaggaacaccaaatattggttccaaaaattctgtccataccttcattaccttatctaactgttctgttgaacacatttctccacatgaatacttgatcagctgatacagatcttcgtgaagatcaggatccggataatcaaaactcatattggaagaaatagttcgtctatttccagccgcaagagcaagaagtgcatcatcttcgcctcgcttcttttcagagatctcttttatctctgccagcaatgctgcagtgaaagatagtagtgcataagaacttcataagtagattttttctaggagcattttctcttataatatgtaaggagaaaaaaccttttgtgctcagattctttgaatcctgctgtttgaaataaaaactgcgatgatcaagcgacctgtggtagttctttgtatatatgtcagcccagactttgttaaactcagtacgacaccttgcccattcttcttgcttttgtttcaaacgggttagtattaccggtaaagcaagatatgcattcttctttaacaaatccaacacatcgagcccatggtcactgtataaccgttctatgcatcttaggtttagagctacaagacaaaaacaaaacaatatacatcagttggaagaaaaaaattcagaatatcagctctgctgtaagagaagagctcaatatacctgtgaggtgatcctcgatacagatgggagtatcggttttcaattcattactgttaatctttgccaataactcttcaactcgattagtagccgagatcacagactctaataacatgtctagctcgaacctaaagcacagcaacaaacaaatatttacctaatcaaaactattccaagaaagcactcaacaaataaacatacattaatcactaacctgtcatcttcacatttgaataggctctcttcgtattggttcttgcgcatgtgtttgaatgaatagtcttcacttcctgaagtgacagagacccaatgatcattaagcacttggctaccaatctccattttttggcttgctataggaattggatactgcaagagaacaaagtatgtatgtacatttaactaatgaagcaaaaaataaaaaaaaaacaagaggggaagatttgttagtgattagcaccatacattctttggaagtctccgataactaggtgtgcactgttcacagttcgagagatctagttcactgataggtttagcccatttctgactcgctgccaccttttcaagcctctccttctcacggtctctttctctatacctttcaatcttctcacgttctcggtctgtatctttgtcaagtgacttagtaggttgaggacatttgccttcactccacaaggattctgtagttacagtaatccaatggttagagtcaattcaatacgtccgaagaggtatgtcagaagtatattataaaaggtactagacttactcttagacacgataccagagagtaatccatctgcagaaagaaaacagaaaaaaggtcaaatcttaagttctttgactggcgagtgtaagaagagaaagcactagttggactggttattaccattcttgtcacactgagccaaaaagactttgaaggcgtccataaggtctggatatacaccaattaaatcactcacctaatacaagaatatatatgttcacgagtcattgacaggtaaagtccataaggtttctcacaaacttctccaacttaaccatgcagtgagaaagcttaagtcagcataaaagcataccaaagactgcaattctggttggctgattatctcctttgaatagagattaagacatcgtaagaactcttggttatccgcggtatcaagctttgccttcactctatcaacaaaagcaagttcttggctatgacctgtaaccacataagacaatttaagaacacaacaactagcagagacgatgaactcactcctaactttctaagaaatcaattatgaaacctttttcatcataagtagatgaactcggaatggctccagaaaacttgtctccttccctggcttgatctgacatttcagcagaatcatcatccttacgtatcaatttctttttgctgttgaagaaatgttctttatggctatcgtggtcaagacctctgtaatctttcctgtctctatcatccatgaaatcattctttttgtcaatgcgtctcacttcttctttactatctttcaacaaagacctctcatggtctacgtccatattttcggttttgagggcacggttaggatgcgaagtaataatccggtccttctgtaacaatatccaaaccagtgatgtctctaagaatcaattgcatagtgaacaactatttaaagaaaaagagaaagaaaccttatcaagatctatttgacgcatggtgggaagagacttaatgcctctatcacgtactggaacttttacagaatcattagtagatgcagttgctgaagtatcagggagaaagtgagtgaactctccaagcaaatcgtgatggtcccgaaaaaggatagccacctgcaagttcaacatattgaaaactaagacaaaaatggacaaccaaaacaatgaaaaaacagtgtaccacaaatggctacaaaacacacacctcatggtagacctcagtaatagacttgttttcctttctatacatgttcaaaatgtctaaaaacgatttgtatacacgatcatcgccttgaaaccttgtctgcagataaaatgatagtagttaagaagccaagtagcaagagaagaaaaaaaggggaaatgcaccatatataatcttctaccttaatcttgttaacaaaactaatagcttcctcaaactcaacaggcttctttggtgcagcgggttggtcatcctcgggtcggagagttatctcgaaaccctttggtaagaaagtattaaaccccaaaatcaattctctgttccctttaaaaagttctttcacccttaagataacaccagtagtatcaactctacaatgacaaaataagatcagatttcaaattgaactaaagagcaaaaaataaaataacagtgagcaaaaacaatacctctgagctttaaaatctttcataacctcaagaaactcatcgtatttgtcacgtttatcttgaaatttatccttgacagctttaagatatgcaagtgcatcatttgtagttagcttctgtgcactacttcctccaaccatggtttatattttgccagagcttcattaaccacagaaaccaaaaaatttagccgcaaattagatcactgtgcatctccaagcaaactcaattcaccaaactaaagtctttgaatttgggcaattcgattgaaaataaaaataaatccttttgaatcttaaatcaagaaacaatccaaataaaatattgaactctgcaagcaatctcaaactaaagcagtagatctagcaagtagagaacaatcaaagcaaaatcgagaaaagagtttaagaaacaatgaagcagaaaaaatcgatcttaagaacttaatcttcagattaattcacattacggcgcttcaagataagaattaagaaacacaaaaaaaaaaaacgcttcgaaaaaagtaaaagatgatcgtagagagagttaccgaattttgcagagacacaagtctacaagcacaagcttcctccttaccgcacacggaaacacaccacaaagacaagactttaaaccaaattctttgcagacagaactaaaaagaaataagacataagttaaaatcatatttatggtgaagatgagaagatgagacttctcaaaggttttttaattttttttacttctgccttaattgtaatttaatttattgtttatattatatgatttggtgtaataactattttactattcattaagcccattttttacttaattaccagaaaaaagttttccctgttattttttaccttttccatcaccatatattatttattattatgaaacatattaaaaaaaagtttattaatattaaaaatgtagtaaatacggtagaggaaacaacagtcaaatgattaatataaaaaaataaaaataataataataagaataataaataaataaaaaacggtagagaaacatatatcgatgatggaaaataaagaattgaaaaaaatatgaaatacaacttagagacagccgttgctaggttgcttataggtagagtaaccggttatagccggtgaggttaattgggggattagggcgcagcagagctagaggattggattttggttattttgggaccttgcaattcgggtttgtgtagttcggtgattttgttatttttgggtgatggtgtgggtataataggaatgttaggagaatttaactatcaatgtcatgtgctacaattagtaaattcgaggctttttatgatctagaaagcattttgccagttttgttttatttatttattgaactgttttatttcatgtataggctatattggtagatcgtagatatgattatggatcatttaagtcgtttggttctttaaggtggttttgtgatttgtaatttttctagtttaaagtaagttttcaacttctaagaatcaaataattccaatgaaaaaatcatttctctcgtgtcggttcaaatttagtttgtcagtcggactttgctaatactcttttgaattttgataggtaggtaaacttaagatgactatgtagatgtggataatttttggtgacatagaatatggttatctaacaacaaagtgaagcttcaatcaaattgggcatttggtctagtggtatgattctcgcttagggtgcgagaggtccggagttcaattctccgaatgccccctttgttttacactatctttttaattaatcctacgtacacttttacttcctttccagttttcttatcttttgggcccaaatattggcattttcacacattttagttttagcgtttgttattgtcggcccattatgtacctacacgacccaacttctctcgtttatgtttccccactctccgagtcaaattaacattgacgccaaaatataacaatgaactggcatggtgatgacatggactttggtcaaacattgatgcagtttggatggtccccaaacattgtcgccttcatctcagagcttggctcgaaccgcaaggtggcttcgtcacactcataactcataactcctgtcgttttttctctacaatccgtgagagaaaatcgcgatccgaagtgtacttctttcctctctttgacatcgttaataatattttttccaatcaaaccgccaatatctacttcggaaacattagctgaaatcttaagaagctgaggattgaagtatttgagattgtagtatctgatcatatacaagattcaattagttttgaaaatacgaacgaattaaggaatttaaaacgggtttaaaaaatagtaggaaatagattcattacttttgtggggatgaggtagcaagagtgacattcttgtaaagcaaggaagcttcaaggtctccttgaagacatatatacttaccaggaagatcatcagggatccttatcgacaaatcccattttgcattaagacgagtcattgtaatattttgcaccgtgaaatccattgaagctaactctattttcggcaccgggattttgccagaattgtcttttatcatcaacaaaaccagaccacaaataccaaaggctatgagaaaagaaacgaagatccgcactcctatagatagttcttcgtctgccattctaagtgattgattgaagagaaacgaggaaactattttggagtgcaaaaggaagatgagacagtttaataaagatatagttgttaaggaaagataatttttaagaaaatgaactttaacctatacttaattatatgatatgttattaaaatttagttaaagatatagttgtttttaattaattaaagtatttcaaaacaataattaagtattttcttattttttcatttttctctctcttttttaaaataaatttatcctccatatcttatttcaaaacaataatctcaaacttgctaactctcgtgattgcaacaaatatcaattaaatcatcagatttcaccatgtataaaatctaaaagttttgaaatatttaagataaaaatataaaagtttgtaactgtattagaaaagaaatttagacaaataaagtaaaataaaaaccatatattaaaagggttatagaaaaaaagttgtaaaagttctttatcctacaaaaaaagtctggttttcaaaattaataactcacaattaaagatgaaatgagtaaacgcatcagcttggattttaaaatctgatagcttcttccctgcattcgacttctctcttgttagcattgcatctgatagagctttggcttccacagttgagccacctcaacacctaggcaatattcttttgtttgtatggtttggttcaaattatcttcttgtaccgtgtcgggtttgttgtcgtttatttgagaatttgtaattcgccgtttgttcttttaattagtgcagcaacctttaacccaaaaaaaaaggtttggtacattctcactaagcataattatattgtcttaagtaaattgataaataatttgtgtattatccataatattcagtttaaatagtataaaacaacttgaaaaattgagtactagttttaccagttcagcaacaaactaatgataatccccattgagtcaaatggaagcagataaagtggctttgaaccacaacttgcatggcttcattgtatacataattcatcattcttcatccataatgtggaagaaagagatgaaattcctcaagcaagtctcgatggccttgaaaaaggatagccacctacaaaataatacattacattaaatccaatacaagaaagatggaaaaagaaaaggtagtgaaacatatatatatatacacctcctggtagagctcagcaacgctcttgttttcctttttatgcgttttcaaaacctctaaaaatgagttgaatacatcattgttctgaaatcttgtctacagaaaaaatgatatttaagagaaaagtaaaaaaaaaaattgtacagaaaagagtaatataatttctagtagggctgcaaaataaacagcaatagagaatacaaatgatataaaccgaaatatttacaccgaaactaacccttaattaaaacgataaatctgatatcctaaattttaacactaaaatctaaacaagtttattcatctctctaaatttaaatgactaaacctgttttttatttagattttagatcttttggatcaaaataatcataatcaaactctaattactagtatgattttgcccaactaccttgaccttgttgacaaattcatatgcttcgtcaaagtgagcaaacttcgaatttgacgtaagttcgtcatcactgagtgttatttcaaaccccgttggcaagaatgtgttgaaacctaagagaagctctggttgccctttgaagagttctttcacttttgatatgacgtcacatgttttagctctacaattagtaaaaaaaaaaaaaaacagtttaccaaaactttatataactaagagctgaaactattatgagggaagaagaagaaaaaaaatacctctgacctctgaaatccttcatgatcgtaagaaaactatcatatatttcacgattatcttgatatttagtttttacaagatggaggaaatcaagtgcatcggttgtagttagcttcttatttgcaaccatggttttgaaactgacaactggcaagtgcttcattatccagaggaagagaaaatagattaatgttcgactcccaatataaacaactttgaaaatcaatacaagtcttaaatctcaataaacgaattcaagatatataagttcaaagaaaaataatcgaaattatcccaaaaattcatacaaccagcgcagatctagcaattagagtcatagaaaacattgcaagggaatttacagctatcgaccagaagatttgaatctaacttactcctcagattatgtcacactatattttgatctaagaatttcagtatagaaacaagataggatcaaagtgaagaggatcgatcaaagttcgctaggacacaagtattgatggacacgttacctcacacgtaacaggcttacaggaagatacaaaagacttgacaattgacacaaagaaagtcgtaaggttttaggtttataaataactacatgagtcatataaagatacttaatatcacgtacgttaaacataatctttttgttaacataacgattcgattttctctcctttatatggattttttactctttttcttaatataccaaatactacttttatgagtcttatccaatatttatagaaagaaaaaagtaggccttcagattaaaaacaaaattgataagtccaaaccgaagtttgtgcaaatcggttctagtttggttattagatacaaaccaatcggtagatttgatttcgaaatttaattatcggttcggtacgttaaacagactaactaaataaattttttaagttgatgtaatgattaacttatgatattgatgtagtaccatatgtttaaatagaatctttttaaaaaatagtatcttactatgagagtataattattaacgaaaataataatacattagaacaaagtatattccattgaagccaaaggaaaaaaaaacaaaagcgcattgtgttgtttaagttctttcctacgatatcaaaaggcaaaagaagaagatccaacatatgcaaactaaaacataaaaatcattattgatgaaaattttacttaagtgtgaatatagtggcatataggagcggcgttttcaaacgcagttgccttcctttgagagccaggctcaaaccgaaccgcagtttcatcacacgtatagttcatcttcctcccagatctacaatccggaagaagcaacctcgatccgaaccgcatgtctcttctttcctttatatcgtccataatgtctttcacaacaacactgtccatatctccctcagaagcaattaccgatgaggtattaagcagctgaggccaatttggtatcagattgtaactgatagagcataacacaaaaaagttcaaacaaaaatatatgaacaaacgaaattagttaaagaaaaaaaaaaaaaaagagtattgaaatttttaaaaagtgtaacctgtctaaggatgaattagcaatggtaacacctttgtaaagtatgaaagtctgcaaatctcctttgagacacatatagtaaccaggaagatctgaaggaagcctgatcactaaatcccatttaacactaagactagtctcggttaaattaaggactgtgaaatccatagatggtattataatatccggtgcatagttttctatacgttgttctttacgccgtttttcacgtcgttcttgtgctgattcagagtaggcataaacgataattgcagcggttgcgatagcgatcaaaaaaaccaagacacacgtgaacacatactttttttgtcgtggtgtaagtctatcccataaagtggtggatttaggagctattatttctccgttttcataatccattgaaacccagagagagacggatagagagatgtgtatatgcaccagatttatgtatcttttttttgttagggttattaaagaaaagagttggtatattgttcttataagaagatttcgataattacatatcaaattttttaaaaagatttcgataattacatataaatttttagattttggtaaataactttcttttcgctaaagatattttagattaaatcaaatagtaatcttagcgttaattggctatgaatcgtcggacagagaaaacttctcaaaggatagaaataggttctttatgttgggctttagatcgttaatgggccataaaacgttaagactcgggactttgggagtgctccagcttgtttggctacgaatcaaagaagcaggctagaacgaaaaataaatcatatgatgatcaaacatagtatattagttttattatcggccaagatgctgtaatttgagatgtttcttaacaactttctattatcacctcgctacaattttaccattctttaccgcaccaatttttttttttaaatagccaaaacatttatttttgtttaccaattcgttcaatagtgaaacttgagtgaaatttttataaactttgtttagggagaaagtattaattgttaaaaattctaaataatacagaaaaaatgttggatatacgaatcataccatggataatttagtagcaccttatattataatcttcagaatattttgtagcattagagagatcaactaagaaaacagtgttgaattctataattaatattttgaaacacacattaatttgtttaatttttttcgtaccgccgcatctcaaactaaaagtaaccagttgtgtataccaaagtatggtctagtcatgaagatgacaattagaagcaactaatcaacaccttaatcttttctcgtacttgatctcgtatcccaacatatatattaattatctttctttccctcacacaccacacgtacatgaatatgtatatagtgtatatactttttaagtaatgtatgtcgaattaaactccaagagaaagatattcgcgtgctttacaataagatatacttataaattcttacttataaattcttttaaaggacctaaaaactgtttttttttttcaggttttggaatgcctttactcttatgaaaagtaatttcgaattatccgtacaatataaattaataaagtaaacttatggttctatgaaatgttattgagatcgacgcttattgtaatttatacgtaggttctatgatatgttcttgagatccatgatttctaatgtacgcgctgcagttacataggttttaccgatgaacaaatttctcatattcattgttgttcccagatttttattttgtatttatggcaataaatttttttagtaagatttgcttagattgactcaactcttaacataaataacttaaatgacacacgtttggtttcaaaaactgtagtaagccatatctttggtaaaaagacgaaataaccttaatgattaattgtaatcaaattaaaacaaaaaataaaaaataaaacaaatcttttatattttaaagcacaagtcactccaccaataaaattttgacaaatcagcaaaaccaaattatttttcaacagaattataaaatcaaaaaggaaatcgtggataaaaaagaaaaccaaaacctatattacataattaaaacaaaaacgaaaatccgtgagaacaaacttttttttaaataataattttgaacaaaatttagataaagaagaatcttcttcacatatttcgtttttgattttaaaaatactaaaaaaaaacaatttaattttgatattgcatattataaattgacttgttttagcttaccaataatattttgacatgtatcaattcacaaataattgatttgatggtaggaatagaagaagaaaaaaaacggttatgaaaacccttggagaatttattatgactaataaaattcattaaaattcaaatatgacaatattatgtaaaaatctgccgacattaataaaagtctgtcgtgacgttatgaaaatttctttttcaaaaaaaaaaaaaattgaatcaaaccggatttaacctacaatcaaaccggaaaatttttacttgagggctagttaataaatctcatgtaacaaaaaaattcgaaattttaaaaacaaatctgctaacaaaaagtctattattactaaaaagtttattctagtcataaataaatcggccataacattgatatgagaaaatctgttatgttttaacactgaaaaacaaaactgttatcactaaaaataaatctgttatcactatgggactgtctagtaattttattttttaacaaaaatctgttataaaacaccagatttgttaacaagttaattaaatctgtgattacacaaaacaactctgtcatgactatataacatttttttgggttaacaaatctgttataacacaacagatttttggttacaaatagaaaatctgctgctaccataaggaaaaatttgcggtatggaaaataaatcagtgacagatttggtttcaacattctaaattttgaaattttagaaaaatctgtggagactatataaaacaaatctgtcacgataaacaaatctgcgaaaaaataaaaatctgtcgtaacttaatccagtaaagtctgtggtacaaaacaagtctgttgtaaacaatctgtggttgaccaaaaaatctgtgatcgaaaacaaatctgttgcaacaagagccacatattcaccaaaaacgacaatggcagttttgtaaataaatgtgattttattgccatgctggaattaaatagtaatgacgtttctgtaatattattttttctgcaaaggaaaacagggacattttaggcataattattatccatataactcatgttttttagtattcctttttggtcattatgaatgaaatatggatcactctggtaattttccctaaattttaatataagactaatggaatataacatttcaaaagaataactatatatcggttgacgtcaaaaaacaaaaaaaaaactatacagtatatcagttactctcattccaaattattaggaaaaaaactgaataattaatttatcttttctatttttataaatgtctatgacgttattaatgaaccaattgtaatatgacagtttttataaatgtctatgaagttttaagttaagtttccgttacaccacggtcgaattttactcgtaaacattcgctggtctcgtttttaacagtttgatttgcctcttgaattgggatttgtcgacccctacaacaagttaactggtgtcagtgctctgtgaagaaaaaattcgacaattttttttgttcgttatatattaacaataaaacttttgaatcgttgattctactcaatctaaagaaaacgtagacatagatggtctttaccaattaccatttttgttaacgttggtctaggtattagctaaaagaattgttatgcataaaaatagccatttcgttgtatcttggacgtacctaaatagattgaaccgaattaaaacttacacaaaaggcagctctctgtttacatattcgttatttttcctagatttcgtttatatattaactcaaatagatatatgacatgacagaaagagaacatagatttagtgatgctacgataccttcaaatgtctaatttcatttgctactttatgttatatcatgtcatatatctacttgagttttttttttatcttctttttttttttttgagaaagagtttttttttatatcattacgtgtaattacactcaaattaacgttcaatagttactaatagcttatgggtacaattcaatctaatgtgcgggaattgttggagaaaacatgttggaggacatctttatgaaaaggagaagaagaataagtaaaggaaaccaaatttgattaaaattttaaaaggtcaagaagatgatacatgggtccatgttgtgctatcttcgctcagaatcacttgcccgcacaccacaaataatctcatcattttatgttttatttatttcccaatatagattggaaaactatgaataaaattggtaagctacaaatatataaccatccaatatggtagcatgatgttttcgaatcttattttcttagttgtcacccaaatttcaaaactgttgttttctattgcagacaagaaaaattatgaatatctttctgactaatatgtatatttacttatttcaaaatagataatattctagataccaacgattttaaatgagggactacaagatgtcaccagtaaaaaaaataaagccagagactaaaaaattgctttgagggagagtacatcatctttctctgtggctgagatccattgcaacaagaatgaaacttgaaaattcaaactagttttaggacttaggatacaatagtttataactatacgaaatgtaatatactttggtataaattttcatactaacaaactttttttttacaaaactaagttaacattatataatttaaaaacattattgtagagaaaattcttttgtgatggcgcatttttaacacctaacatattatattgaattttgcaaatcaaaatgtatcatatacatattttcaagaatcgttttctaacgatcactttctacatgcatcatgcatgttagacaaagtagcaaagttgtgttcacataactttacgaaaaagttaatcatataatacattaaaatacatgtctcatgtaagatgttaattgaaaccatacaaaaatatatagacaataagtgtgtaatgttgatttagggattaaatattatagttgggaacaagtgaatattgggtgagggtaatggcccatgacaagaatgaagtaagtgacaactaaatctttttcaacaaaaaaaggaagcgaccgaatatgcctccttcaccgtccattcactctttgttccctccaccactcttttgtcaatccatttgttttcttcttatttaattctaatacactcagattacaactttgggtctgaccataaatttttgcatttttaagaatcaatcattcgtatatggacatttggttttcgattacgctgctggaaattttgtctagtgatgtattagtgggatagatttacatatattgttcgatagcttcacagtcaacgattattttggctctaaaaaaagatttttaaaaaatgatgttaactaaataaaaagaaagataatataaaaggagatctacggaatatagtcgtagtttgtctccatgttcatcttatatcaaaattgttaaagatttgaactctttatccgatctagaggacaatcaacgaaagcttcaaaagctgttagttcgtgggaacttggtttctatgttaacatgatgttcctaagataatataaacataaatattgcggtcaaacataactgtaagagtttgtaaaatttagtgaaaatgaatgatcaatttgctaacgtatcatatttatggcacgggattataagtatgcaacatagattactacccttgtgttcttttttgcaacacgtaatttatttttaatcatttgctaatgaattatgtatgccattaaaaattatcaattacatacgtcataacactaaacaaaatgctaatactattagtaaaacaatctcattctcattaattagcaaaagagtacaattgggggtttatatacaaactgacattggcctaaaccataagcctctaaaccaaaattaagattggtttatagaataccaacctgtacagactctatatgaaatctatactaaccaaactaagcttatatacaacaatctaagctatatacattaatagtccccctcaagatgagacgaagatgttgagtagacccatcttgcttattagacgatggaagtgagatggatataaaggcttggtgaacggatctgcaatttgcaattcagtattgatatgataaagttcaaacaaacctttaagaagtcgttctctgacactgtggcaatctgattctatgtgcttcgtgcgctcatggaagacatgattgttagctatgtgaatcgcagcttcattgtcacagaagagaagagttggcttactcaatggaacctgcaattcctttaagaaatttgtaagccaaaccaattcatcagttgcaacagagagacttctatattcagcttctgctgatgatttggaaacaacgtcttgtttccgtgatttccagcaaataagagagtcaccaagaaacatacaataacctgatgtagagcgacgactatcacgacaggagttataatctgcatttgcatagaccttaagctgaagttcagaagttgcagaatagaagagaccttgcccaatagtacctttaatgtattgcagaatcttgtaaactgcttgtaaatgagctttacgaggtgccatggagaattgagccagcttattgacagcaaaagtgatgtcagggcgtgtgatgttaaggtacatcaatcgtccaatgagccgtctataaggtccaacttcaacaaagtcaccaccactatcatgagcaaaaaccatacttggatccataggaatgcttgatggcttacaaccaagctgacctgtttcatcaagaaggtccaaagcatattttcgctgacttatatgaatacccttatctgatctaacaatctccaagccaagaaaatatttcaattcacccaaatcacgaagcttgaagaatgatttcatctgtgactttagaatatcaactgctgcatcattgttactagcaatgatgatatcatcaatataaactagaacacagagaaagatgccatcagagattttcagaaaacaagtgtgatcacagtaagactgaataaaacccagaccaagtaaggtagatgaaaatttgagataccactgccgagaggcttgtttgagtccatataaggacttcttcaaccgacaaacagcatttggaggtaaggagtccccctgtcttgatgcatagccttgaggaagtcgcatatatatttcttcatctagatctccattaagaaaagcgttagatatatcaagttgtgtaagagacaatttaaaacgagcagccacaccaagaagaagtttgacagagttaagcttcgcaacaggagaaaaagtctcattgtagtcaatcccttctttttgagtataaccttgagcaactaaacgagctttgtatctctccacactaccatcagaattatatttgatcttaaagatccagcgacaaccaatacaccttttatctgcaggcaaagagcaaacttcccaagtatgtgtaccttctaagaaatcaaattcagcacccatagcatcacgccaaacctgaagtttctctgcctcagtatagttagagggttctttagttttatcaagacaagcgagaaaagtaagataaggatcattaatcctatcataagagaggaattttcgaatttcatgtggagttgaagacactactgaatgacagtagtaatcttgaagataagcaggctttttggccttcctatgcgatgtttgaacagaaggttcagggacattattagtaggatttgcagaaggcaaaatctctacagacgatgatgaatcagaaggattaacatgatcagatgattgacgttgcataggaggtgtaggattcagatcaggaaagaaattttgctcttcctgagaaagatctgatccaagaaagggaaagagctcttcatggaacacaacatgtctagaaacaattatagaatgtgtctctagatccaagagtttgtatcctttaaatccagatggataaccaatgaaagcacaagctttagctctaggagaaaatttatgtctgtctttgggagaggtggaagcataacatagacatccaaaaactttaatatgatcataagttggaacagtcttagttaacacctcaaaaggacatttgtcctctagaataggagcaggaagacgattaatgagatacactgcagtaagaatacagtctccccaataagaaataggaatgtgtgattgaaagaaaagggatctagcaacattgagaatatgctgatgttttctttcaaccacagagttttgctggggtgtttcaggacaagaatgatatggcacaatgcctttagaatgatagaattgagtgaaatttaattcgggagcattgtcagacctaacccctttaatagtggtttcaaattgattttctaccatagtgacaaaggtggggataacagtaaggacatcagacttatttcttaagagatatacccatgtagctctagaataatcatctacaatggttaagaaatatctatacccatcatgagtttgaacagaaaagggaccccaagtgtctatatggattaaatcaaaaggtctgctactcttattattatgagaaacaaaagggagatgtttttgttttgatatatgacagacccgacaatgaaaatctgtattatttttctgttttggaaaagataacaaagaggacatgggttgtaacttttgaactgaaggatgacctagccttttatgccacaaatcatgactagtaacagacgcaacagttatagaagaatctgtacctggatgagataatgaatcaagatccacaatgtacagattagctacttgtttacccattccaaccattaattcccgtgtagcatcctgaagaacacaggaagtttcatcaaaccagattctacaccccatactcttagttaaagaactgacactaagaagattgaatttgaactggggaatgaaaagaacatcattaaggatgagatgtctacccaagtgaactgaacctataccaacaatgctcacacgaattccattaggcaaggaaacagtagtatcatgaagatatttaaaggaagaaaaaaaatgtttatcatggcaaatatgattggttgctcctgtatctatgacccaagaatgaatagcagtgacattgctatctaaagaacagacataaggcctagcaattccggcaaaagaacaaaggatagagggaaaaaggttaccggaaattgggcacactgtggaagaagaagaaggatcggaagatactgagatagagtgtacttcaggttgaacgggagtactaggaggctgaagtttggaactcagaaaggacacaagttgttgaatttgagaagtcgtcaaatcaccagtcgaaacacttgtgttgttaacaacctcttctgaaccaatagcagcattagccgagatagaaggcttcacaaatttctgcttagacttgaaagaagttggataaccatgtttcttgtaacaagtgtcttcaacatgaccaggtcgactacagtaagaacaaactggcctctcctttttctgataagtatctccattaagagcagactgtgaagactgattagagacaggaaacactgatgaagtcattcctggagtagtagaaatccttgcagaacgttgagtttcatcttgatcaatcatgttgaaaacctcagacaaagatggcaaagttttcttcatgagaatctgactcctaacagtatcataacaatcattgagtcccataagaaaatcaatgactctattagtctctctttcaatcagaagatcttctacagtccgtggaacagcctgaagactcgtcaattcttcccaaagagtttgagtacgagtatgatacgatgacaaatccagattgccttgacgaagagagtgaatctgttgacgcagcttgtaaagtcgagggaggctagatttgtgaaatcgagtatagagatctttccagattgcagcggctgtgggaaaatacaagatgcttgtatagatctcctttgatacactattcagaagccaagacttaaccatactgttacaacgacgccagattttgcaataaggatcatcatcatcaggttttggaatagatccatccacaaatccaagcttattcttagcttcaatgctagtagtcatagctataatccaggttccatagttgtttccatctaacagttctggagctaggactaaaccaggatgatcggagctaacaagatgataaggactatgactattatcaggagaatccgatacctcaaagtgacgcgatgagctatattgagctggttgatgaatcgcagcatgaatcgaggatcctggagctctcgctgatgaaccagaagactgctcatgaatcttcggtgaagcaatgacaggaagatccggtgaactactccgacgaacactctttccatttcgtttacctatggagaatcgaaacagctaaccaaagagactgaatcgcaaaggagacgaaaggaaaacgtgtagaagagagaagaagaacaatgagaagatgaacaaactccggtgagattccggtgagattccggtgagatctaatcggagaagtttgttacgggactgagatcgagatattttgctctgataccatattagtaaaacaatctcattctcattaattagcaaaagagtacaattgggggtttatatacaaactgacattggcctaaaccataagcctctaaaccaaaattaagattggtttataaaataccaacctttacagactctatatgaaatctatactaaccaaactaagtttatatacaacaatctaagttatatacattaataaatacaaaccttcacctaagaaaatatctttaacccgacataaatttgttactacggacatgtttttgtttaattggagaaagatatatgattgtgtatggtgtctattgattgattgtcacagaagtataggcattttctgttattggcaaactaagaaagaaaagacattttccactagttatgtaatgcatcttcgaaatacccaacggaccaaacctgctcatcctttccgtttttgatattatataacaatattttatatcttttaatcgctaaaaacgaatattatataaatgtattggatgtccaaaaaaaaaaatgtgaatggaggctttcatatgctatatcactatcaaccaatcacagaacatctttgacagaaggttacctatgcacgtacactacacatacgatgctctttgtttatatctttgcttatagtttatcgatgctaaccactgtaagaattaagtaaagttaatgccaatttaacattaagttaaaattactgtaaaaagtaaattagataggctgccttttaaaaaaattgttgaattataaccatatttgcttttcaaacatgcatgtcccaagtaacagaacaaacaaaaaaaagaagaagtttggcgtaatgctcctataccatgggttagtgctctcaagcgggtcatgtgtacaccaacaatatcaatttttgggtgtttgcttttaactgaaaaagtaaacgcatcgaatctttattatgatttcgatgaataatgataaaatttgggacaatttcaattcaagtgaggaaaacgtgtctgtgccttcttggtaaatctaacactgaaatttgacacgcagttgcttctatagtcagtaattccaataaagcatctaaaattgcatttgaatatttaatcatagtcgtccctatcaataattgtcaccaacaaagataaagggtaaataagaaacatataatgaaaattgaatggtcgtagttttatatgttagttggaaccaaagattcttcaatctatcatccactcagagctacgtggacagtcgatattttgggttatataaaaaaaaacaaaattgtactataagacaaaagaaaacagtattaaaaaaaaaaaaatcaataacaagattatatcttatcccaatgaacaaaatgaaaatttagttattttgaataatgttacaggttttaattaaattatactatatcacaaacagcaagagtcagatacatcgaacggtccagctttcctcctttatttttttctggctatcgttttgatgcaaagttgtttcgttaatcgtgaaaattaaaaagctacagcaatcttctccgaaacttcatacactcgccgacaagagaaacttcatccactcggatttctcgtaacttgcagcactaaacatttcatgaaactattcacaaaagtccacgaaccttgcaattggccacaaaatttaaaatacttatatacgtaacgacaacctatccatatttttctttctaacgatccaaaactggccacgcttcgactccatggtgatattaactagggaagtggctaatggcaaacaagtgcttagaagtggtaaattcaaataataaccgtcgattatttctttctaaccgttattgaggttaccaattaaaaaaagtgatcacaaactaggtcaatgaaaagggagattttttgttttctttgggccaatgaaaatagaaactaagatggacaaaagaaaatattataattggacaaaacagagtcatttgagatttaaaacagagaagtaataaaggtcaaatgtttttgtggtgagctctcaaaaacagacataaaaaaaagaagcagaatcattcccatttataacaaacctaaacctctcttttcttcttctctttacctttttcattccaaaatctctctctctctctctctctttctctggctcgggaagaagatgtcacgtagttgctcacagtgtggaaacaacggccacaactctcgcacatgtccgacggacataactaccaccggtgacaacaacgacaaaggcggcggggagaaagccatcatgctttttggcgtccgcgtcacggaagcttcatcatcttgttttagaaaaagtgttagtatgaacaatctctctcaattcgatcaaactcctgatcccaacccaaccgatgacggtggttacgcttcagacgacgtcgttcacgcctccggtagaaaccgtgaacgcaaacgaggttaataaaataacctttcttctctctttcccaaatctcatctctgtttttgtttcttgtttttgaaactttcttgcaaatttggaatttaggaactccatggacagaggaagaacatagattgtttcttactggattgcataaagttggaaaaggtgattggagaggaatctctagaaactttgttaaaactcgaacacctactcaggtagcgagtcatgctcagaaatattttctccggcggactaatcagaatcgtcgtcgtcgtagatcaagcctcttcgatatcactcccgattcggtaacgtttcattctttaaaatctataattaaaatcaagaatctgtaagattatactaacacataaggttcgatatgtcaacagtttataggatcatcaaaagaagagaatcagttacagactccattggagctaatccgtccagttccgattcctattccgattccaccgtcgcggaagatggctgatttgaatcttaacaagaaaaaaactccagcgacaacggagatgtttccgctgtcgctgaatttgcagaggccgtcttcgtcgacatcgtcatcgtccaatgaacagaaggcacgtggctcacgtgcctcctcggggttcgaggcgatgtcgagtaatggagatagtataatgggagtggcttgatgaagaagataatgttttaattaatttatattgtataagataagatctggatgatgattaatttgaaatttgagaattaggctaattagatactttgatcagaatcaagtgagtttttaagtttgaattagtgtgtacatgtttttttgctctttttgggggaaacgacttgtcgtttttgttgttgtatgatgtaaaacaacaggtagtctctgtgttgttttggtcaagacttgatcagattcagaagtgaagacgacttcaagcttaagatagtttagatgtgtcttttgaaaagtttaaacagaatggttattgggttaaggttaagtgtatctcatatgctttttctatctttttttttggtaagacttttccagtaatttgccgttttcttcggggtgtgtgttgttgataatgtcacattcatgaaccaaacacagttatattactttagtaacagtttttttttgtttttttgtttgtcgtttgacgtcattttgttttatttatgttattacatacatggatataatttatgaaactgccaagaaaacaaagaatataatttgttgaattgttattggcctaccaactatatcagcaagattcgaatctatactttgttaaaatgtctcaatgtaggactggactggagataaatataaagtaatatatagggtaaagtttctaagtcttgtatagcatgatttttattagggaatagaattctaatttcatgatgtaattcaaacaactgaaatggaaaattgtttaaaactagctaaacttgtacagttgtactatttagagcccaaagtgataactgttttatggcttttatccatgcaaaagaaaaacatcaaaataaagtgatgtccatcacatacatcttaaataaagtaataatgggcctagctaaggtatagcccatgggcttattcgctgatctaaccaaagtgtcgctaattttcttccttgtttttttaacgcaaattttcttccatgtcaattatgtctttttaatcaaaaattcctccacaccaaaaaagaacgtaaaaactaaaaatagaacaaattcaactacactcagataatcgaattgctatgtccaatatccaaaacatttcaagccatttagtgctctcactaaacatattttaacaaaatatgaaataacattcccaaaattgcgatcaaaaggctagaaacatcttcaacaattatgacagtcctaaaccaacagttcaaacacgttttatatctgtttggccaaattaaacgaatataacataaaaatacgattgatcttagacaattactaaagtttctaaataataatctatactttcacaaaacaagaaatacaaattgattcttgcgcagaaagtgctttggtacctactttttttaccacctttccttttcaattgagacatcaacacattcactaaaacaaactctcaaactgctctaaacgacaccgtttagttacagataactttacttgtatttaaagtcaccaaaagtttgaatttttatttgtgccttccacaaagctttaagcttaaacacagtcaatggccgtccttccgccataaaaggacaaaaaaaaagcttccctcttttcacaaaaccctaaagaaacaaaaaaaaaaccatcatgaaaacgatctcaatcttcttcgtcatcatcttaatgtcatcttctcacgcagaagacgatgtactctgtctcaaaggctttaaatcatcactcaaagatccttcaaatcaactcaacacatggtctttccctaattcatcatcgtcgatttgcaaactcaccggagtttcttgctggaacgctaaagagaatcgaattctctctcttcagcttcaatcaatgcaactctctggtcaaatccctgaatctcttaaactatgtcggagtttacaatctttagatctttcctttaatgatttctccggtttgattccttcacaaatatgttcttggcttccttatcttgttactttagatctttccggtaacaaactctccggttcgataccgtctcagatcgttgactgtaaattcttaaacagcttagctctaaaccagaacaagttaaccggttcgattccgtctgaattaacccggttaaaccgtctccaacgactttctctagctgataacgatctctctggttcgattccctccgagctatctcattacggagaagatggttttcgcggtaatggcggactttgtggtaagccgttatccaactgcggttcgtttaacggtaaaaacttaacgatcattgtaactgctggcgttattggagctgttggttcattgtgtgttggatttgggatgttttggtggttctttattagagataggaggaagatgaataactacggttatggcgccggaaaatgtaaggatgatagtgattggattggtttgttgagatcacataagcttgtgcaagttactctgtttcagaaacctattgtgaagatcaaattggttgatttgattgaagctacgaacggttttgattccgggaatatcgttgtttcgtcgagaagtggtgtctcgtacaaagctgatttgcctgatgggtctacattggaggttaagaggcttagtagttgttgtgagcttagtgagaaacagtttaggtctgagattaacaagttaggtcagatcaggcatccgaatttggttccgcttctcgggttttgcgttgtggaagacgagatattgttggtgtataagcatatggctaatgggacgttgtattctcagctgcagcaatgggatattgattggccaactcgggttagagtcgctgttggagcggctagagggctagcttggttgcaccatggatgtcaaccgttgtatatgcatcaatatatcagctcaaatgtgattcttcttgacgaagatttcgatgctcgtgttattgattacggtttggggaagttagtgagttctcaagactctaaagatagctcgtttagtaacggcaagtttggttacgttgcgcctgagtattcgagcactatggttgcgtctttgagtggagatgtgtatgggtttgggattgtgcttcttgagattgttacaggacaaaagcctgttttgattaacaacggtgaagaagggtttaaggagagtttagtggagtgggtgagtaagcatttgagtaatggtagaagcaaagatgctattgatagaaggatttttggtaaaggatatgatgatgagataatgcaagttttgagaattgcgtgtagttgcgttgtatcgaggcctaaagaaagaccgttgatgatccaagtttatgaatctttgaagaatttgggagatcaacatggtttcttctctgagtatagcgatgagtttccactcatctttaacaaacaagaacacttaaaatgaatgaaaaggttttattactttcgtactccaatttgataccacttacttatctaccgttctcacttttaaccgcatttttttgtttttttctgttttgtttttgtgtgctgtataattctgtacatcatgtgatgcatccaatgaaaatgagaagaattgttttatatagatcaaactttgaagattctgattcaaaaagtctatcaagtgttagtgtttctatgagattctagttgtagttgttatcgaacgatttgaaattcgatttcaagcgaaaagacattatccaacgatgtttctgtttcttctaatgattctatggataattataatcttttctgataggagaaaaaattaatgtttcccaagtcgctaatgaaaaatttgataaaattttataagataataggataatattttttgaaaatctttgtgtaaatatatagtcccttaatatttaaattgataatcatataaattacatatatataaattgatatattaatgtactttatgcttttagtgtgtgtttttaattaaaattaaattttttgttacagcttatctctaatttttattgtataaaaaaattattatgttgtgtttttaaaatattgaatcgtaatatactttataaatatgatagcattagtttgaaaaacttggtttggagtgaaacattctctatagtttttaaattttgaatatatctcatttttgcgtgttctaaaaaatagaatatatatcattttcattttaatagttttatttttaagaaaaaaaatacgacaaatgaagtcaaaagagtatgtagaactgaattcatctaaagagtttgtatttttttttttaatttacatctatcgtttgtataagtgaattcatctaaaagatttgtaatttattatcaaaagatggttttcctaaatattaaaattttacaatatatcaaaactataaaaaaatgataacatgcacaacactaattttgtttagataaaaatttcttaattcatcttttaataaaaatttaacaattaattcttttaaaaattattaaataatagtagataaactaataatactataaattaataaaatatcacatgatctcaacatttttattttatagaggttttactgtatatggaaataagaaaggtaaaatattagtagaaaatttggaaagaatgaaacaaagtagaaaaactggaaactagatatatgtatattaaaattttggcatgcatgatattacattatacatttttataatcacattttttcaattctctgtatagtaaattttccgtaaatctcagtaattaacttttatttctatgtatctagttatatatacacgctctttgtttattttctctgtcaacagtaaaaacaacacacaagataagaagctaagttaagatctttgaataagaagaaagaagtatgtcgaaaattttgctcctcataggacttgctctccttgtaatccttgcaattgctgttatgggatacttaataatgaagcgtggtcaagaatagaagccggatgtttaatttaacggttatgtagtttttttttttttcttctttctccttagagtgttggggtgaaactataaaactttttgattttctatttgtgttgctccatattgttatcagtggatagaagtaggaatgatttctagctatttcatgtgtgtttgtgtcataatcacctaagaattatgattttttctaaatcttatggatgtcatctgacccccttaccctccatgtaaatcttaatgactaactttgaaaacaaaattttatacaataagataatgaattatggaaacgaacaattagctcccaaatccaccttatgggctagacttacaccacacaaaaaaagaagaagtggagacgtgtctgttgttcttctttatatgtatatcaccattgactggttttatgcagcacaaagaggtaaacaacaccagcgtatgaaaaattatgatccggatattataataccatctatggatttcacagtccttaatttaaccgagactagtagtgttaaatgggatttagtgatcaggcttcctttaaaccttcctggttactatatgtgtctctgttggaattgagaatcctagattaaatcctgcaataagtaaagcttggttgtgaagaacagaagaagcatcgtaagaagaagacgatgtcgatgtcgagaagagacgtcgtgaacaaggtcaacgacaacaagaagaaagcaaagtcaacacaaggagatgttgggctttgtagttttgtaataattatactattgggctaaagaaataaattaataggcccaatgaatcaaaatgttatgaaatcggtttaccattcaatggtagacataggattatgttgggattcgataggattaattgaaactatcggggctaattttataattctcttaggtaaaaggtttacttgagaaataatgagtagtatcggggctcttatgtaaattatcacatctcttctgcgagttatttttgtttctacgaagaaaaaagaagaagaagaagaaacaacaaaaatggcttctcagagttcttcactttttctggttatcttcttcatcttcatctacgcttcttcaattccatcctctattctcgccagagcacatgaacagtttcgtacttacaattttcttccaagttaatttgaatctgacgatgatcgatctcgcttgttgactcgtatttgatttatcgatctctacagtgacggagatgaagagatcagaagcgttgggcgtagattccttctaggtttcaaagaaactccaaaaggaagtaatatcaccttcgcttgttctccttcaggtccttgtgtctcttgcaattcctccgaaaaggtttttcaaatttcctctctaattgctctgttttggtatcggatctgtgatctagggtttcagaactagcttaatctgattaatcagcgaaattgattatacagtgaattggatttggttaggaatctgaagaacatttatatgatctagattgtttttttggtgatctagggtttcataatcaataatttatcggcctaattgattatacagtgaattagatatggatttaggaatctgaagaacatttatatgatctcttctctttgttttggttggtgtggtttcttttgtagagaaaagagaagtatcgttgcagtgaaactggttatcgtattcctttcaaatgtaaagaggttagagaagaagtggatgcacataagaaaaatggagaagaagaaacacaaaatgatcaatcgaataacaatgacgaagaagcgaaaacaaggaatctgttggatgattcatcaccggcgacgaaagtgaagtctcagtcttacaaaacttatagaagctgtgtgccatctgcagacgaagagaagttatcagttcttggttttgaggtacagagaaacacttacatttcaacaagtcgtttcttttagaatatgtgctaatgttagattgttttgaataaatggacagtcgattatgctaggactgtttctgttaagcggagctgctatttacatcagaaagagacagacggtaccgatgcttggggtatcatcaagtggaagattgcaaggcaattctcggttttgaaagaaccatttctcggtatgtaaaagctttcatctgctcactcagaaacagatttaacatttgtcattgtctgttgaaagatgagatatgtttgagtgtatagaatagctttagggggacttcatataattgggactacttgtttcatatatggcaaccatgtttggctttgatgatgtaactttgcttatcgtctctgaactttagagaaagcatcgattacggtgaaacgatgtcctcacttacctttagtagtttggtatatagtatgattgcttggtcttgaacctcggtgatgagcttgctggtaggaagaggttagtacaactgtgcaatagactagttaaagtaagtaacgtatcattcttgagtccaacaggtccaacagaaaccttacacttatcaatgtgcctaagaaatgtggaccacggtcaacgacaaacgaagatactatgaaggatagtgtcgcaccgtcaaaactaatttgcagtgagtagaagtattaaaccaaatccaacaagtgacgttgcatgtaaaaacggttgtaaaaagttgatttagtttataaaaaacgtatcttcagcatacagtttatcgttaaatttaaaagtaattatatgtaaattgcgagcgatgatagaaatagattatataacgtatagtaatcaacaactcttgtaaattcttcgagcaaattttctcgttgggcaatgttgaagcctgcataaaaatagagacccgaaggattcttatagacgggagtggtcaccacgttagcaatggagattgtttacaaagttaccttttttttagtattttaatctcgttaatgataaaatgaatatgtaagtgccattttttcagttacttcgactagaagctagtgagtaacacacaaaggcataagattctcaggacaaatatacatttaacttttttaggaaaggtaatttattttgaagtgggattcatgtaaaatcttaacaaatttgatcgatgagatgaattatgcacttatgcttcattggccctatatttatataaactatgggataaattatggctgctatgtgacagtgatataaaacattattcctaaggaacaatttttaatcatgggtctagtcaatcttgtcattctcatctttatttctgaaaactttaaaatgtgcaaatcttaagatacataaagaatggctaatgttattaacgcataattaatatgttttgttaatgtacaagattgctaatatctcgacagatcaacatatattattcgatgttttgcataggggagctcttataatgatctattttattataaatggtactagactactaaatacattaaaaaataaaacggtgaggaatataataagcttgatcggaactaggtagatactatatattatgtattgtgccaaattcgacataaggacatgcgtatacaattagttattatagatatagaaatttgtgagaatacgtgacgataactgtttatgtttataaaatatggttataaattaggtatgcatggaatggttatgtgcttagctttactttttggatacgaaagagatgaattgtacgtgagaaaagtactagagggaaccctttgtcacgtgtacttctaataatctaatatcatatgagtacattaattttagtgattaagtaaatctgcatggaaatacacatttgatatatataaagtgaaggctggtaaataaattcccttcatgtcacgtttcggaccagctgttccatatttcattgtctctcttttctcatatttttggtccttaacaaaaaaacaaaaagagaatattgcgtttaatgtatataattatccctgctatatatatttatattatttgggatataatgaggcgacataaaaatacggattcatgcttaaagataacactagttataaaatctcacagaaatatataaagattcatagcagaaaataatttctctctctctctctctctatcctataatgtttcgagtaaagtttgtaaaacatattgaacagaataaaaaccatcgaacatataaagaacaccaaccatcctaactcaacaaagtgataagactctctttctttctctctctctctccatctccctctctttctcttgcttttgttgtcactcatctttgttctctattatagtttccattcaagaaaatcgaatataaaccctactacttcgatcgatgttcatatctgtctttatttcaaccaaccaacgaagataggataaaaacatatccacaaaggctagaaaccatgcgaaataaccattcccttcgtctccaattgtggttccgtacactatttactgttggtgtagtcactcttcttatgatcgatgcgtttgtattacaaaacaacaaggaggacgacaaaacaaaagagattactacagctgtgaacatgaacaactccgatgccaaggaaatacaacaagagcttgaagatggttcaaggaacgacgatcttagctacgtagcaagcaaaagaaaagtgcctcgtggacctgatcctatacacaacaggttcttactactttctcgttttattttatcacttttaactaatccttacccctacctgcatatatgtgtcttggatgtttctgtatgatatttcattaatatataataatatatgacataaacccgtgtgtggtgccacattcatattagttaggtctaagttcaagggctataagcctaaaattctctacaaccccatattagattccgttatgttcaaattatacgcgtggaccacttggtcacttgcatttcgaccatggtgttgtttaacatgtggtttttaccaaggacatgctcttagtatggtctagatataaattcgatattgagattaatgaatgacatctagaaatgactatattagatgaaatcaagcaagctaactcgttgattgtctatatgtttatgcatgttataataagttttgtttcgggtcaccataaatatacttctagcacaattttactaaaaaaacaaacactttgtttcttttaactaactcagattcggtgagacatatcacagaagctcgcaaaaggctgtctgctagctttattcagtctttacgtttaacaatctatttttaattattcactataagatggcttcttttaaaaactttcttttttcctttatggaagctttagccctttgaacactcccttttttttcttagttatataggtaacccacttatgatcacagttaattccatgtagatcgtattaaagtagtctattgactaaatcactaaaatatcaattaatgaattaatgttgtatgatttgttatcgtttatacgaaagtaaagaaaaacaagaaaacatgacttggattaagtaactctatgttctgtcttaatacaggagagcagggaattcaagacgaccaccaggaagagcataagtacggttaaagcttgggtaagaagcagaaagagagagagaagtataattgttggcaaattaatataggtcttgtattgctgctagattctcttttcctttcatttgggatcgaatcttttaaatatgcgcaaaatatttgtgaccctacaattctgttttttttttttttaaatgtttgttttgttcctatagtgaagaaatattgagctagttaggggaggttttaaaaaaatgaagacactgattattaaaaggatttcaagaaagaaaagaagtatacgtacatgcaatgcaatcctgttttctcacgcattgcacgacttatattgggattatttctaatttgatccatcatcaaataacgtttagatgctttatttccttactcacattgtttattgggtacttgcactaaatgatcattaacatttattaagttaggtaaataattgtgtactccttttatgtgcaaaaacacaaaatgggtactattttattactaacatgctttcttatcaaatagcagtaccctatgttgttctaaataacatgctaattcaattcagatttggcagacaaaataacatggtattttagagagagcgcgcacaagtgtgtttttttaaaacaaatgaaaacatcataattacgtacctgattgacccttgtgtatatattcacgattagaaattgtagattaccaaaacactcgcacaaaatggttctatatatagacaatatatgattcttatcacatgttttgaatgaaaaaaaaagaattaagatggattttttttttgtaaagaacaattgtactttgaaagagtcttatccaatcattaaaaaaaatgtcgaatccattatttattgatgtattctgaaagcatatattcttccaaaggggcaaataaaagagatgtcgacaaagattggatacataagatattaataatttataaatgcaatggcatatatatatgatataatttgagctctaaatgccgaaatttgaaaaggagaatgtgtgtaatggttcttacaaataaaggagaccacaatgcttctttgtgttatgcttttttcccatcttttattcttttgttcttttgtggggttaactctaccactactcattttctcgctcttttttcacttattttccatatatttctaatttctaaattaattttactaatcttgaaatacaaaaaactattagacttagcttactaatttactacaccaccaacatacacactacgcaacatatgctaatatgtattaaaatgaaaagaacaaaaaatgagaaccggtattacaatttatcgtagtgtatgactagttatgagatgagaaggttcttgaaaaaagaattactaaccaaataatgtagattaattatttgcaaataaagaaaagcaagaatatatagcaaaatcatgagtttacggttcggctctataaaatcttctacaaccatccacgataaacttgatacatgaaatgtcttcttccattaaaacatgagttccacatataaaatggtttacaagtaactctcgaacatatgtgcatggtaaagcaaatatataataccattattttttctgtcttaattaagcaaaattaaacatatatataatatatgatccctacatgttcacttttaaagttcacaatttcaagagtttgaatatctttaatttgaattattaccaaacgcattagacagactaaacagagacataataatcaatcaacttctttttgtcttttttttttttttttttttgggcttccagtcttcataatcaaaagtaactgaagaccagtcttaaagctggaacatttgaactaaacatatacgactgctcctatcgctctagaaattttaattaacaattattcatagttacttaattacaaagacaacaataaaggtgaacgaataaattaaaggaaaattatgaaaatagtttaatttgtatgaaacttttcatccgcataccaaatgtcatatactcttatcttacatttttctcttgggacatatttttggagcgaacactttcgcatgtacgataaggttcagtggtctgagcttcgactacgttaaaatgatgattagggtttactaatttggaattaggagttacatttaaggttaaaagtttatgagtttcaagtttcaacgaagctttaaagtttaaacgatggttaaagttttatgattatggtgggctatgttatagttctttcaatttcgttgggccaaatgggctaaacgattaacgaccctatgaatgggcctgaaaaaatgaaagccacgtgtcagacccccacaatggactttgactcggtgcggctgccggagagaataattaattatcaactccgatgaaaagaaaacaaatacaaagttccaacaaaaatcgaaattcacaatttctcttcttctaaatccatggagtgatgatgatgatagatagattgaatccaaacacaaaccggatccgagattaaaaacaatccggattgtttatatttactttagatcggagaaagatgccgccggcgaccggagatatcgatcgtcagatcgagcagcttatggagtgtaaagcgttatctgaaacggaggtgaagatgttgtgtgagcacgcaaagacgattcttgtggaagagtataatgttcaaccggttaaatgtccggttaccgtctgcggtgatatccacggccaattttacgatctaatcgagctttttcgtatcggtggttcttctcctgatactaattatcttttcatgggtgattatgttggtgagagtctctctttaccttatagctttttttagggtttctacatttctcacatctcttgatttggatttgggtattttccctaatttggatttgattttgttgaccttttggggctaatgtagacttatttggaagtgtttactagaaatggatagattattgtttatctatcgaaaagttttggttttggaagattttgtcattgaaaagacgaaacttttgttttagctgttaactattctcagggcttctacaatggagtagcttgaccttgggagatataacattttaatgtagtttgtgaagcttcatgttcgagtactcggatttgtgtttctcttttctctgtttaagtgccttaagctccgtttcctacttaagttgctcaattagctaactaatggatcattgttaaacttgtgaagatcgagggtattattctgtggagacagtctcacttttggtagcactgaaagttcgttacagagatagacttactatcctaagagggaatcatgaaagccgtcaaattactcaagtgtaagttgttttctctactaagttttgtattataagcttctcagcctctctcaaaatgtttcttgctgattgcttacctttttcaggtatgggttttatgatgaatgtttgaggaaatatggaaatgctaatgtatggaagcacttcactgatctttttgattatcttccacttacagctcttattgagagtcaggtatttaaaaaactaatgagcgttttcactaccttagacaatctcttctctgtttctgctgttttggacttgactacagaactctttttttctgtaggttttctgtttacatggaggactttcaccttctttagatacacttgacaacatccgatctttagatcgaattcaagaggttagttccagaatccaaaccaacaaaaggatgcaccttacttgatgtttacataacgagactaagatgtttgtgttgcctctaggttccacatgaaggaccaatgtgtgatctcttatggtctgatccagatgaccgatgcggttggggaatatctcctcgtggtgcaggctacactttcggacaagatatcgctactcagtttaaccacaccaatggactctctctgatttcaagagcacatcaacttgtcatggaaggttttaattggtgccaagaaaagaacgttgtgactgtatttagtgccccaaactattgctaccgttgtggcaacatggctgcgattctagagatcggtgagaacatggaccagaatttccttcagtttgatccagctccacgtcaagtcgaacccgaaaccactcgcaagactccagattattttttgtaagtaccaaaagaactaaagctgcaattccacacactagctcttcgtctcttttgcttctattcttaaccactttttgtaatttcatattccttacgtctatttctgtttgttaaactctccattgtcttttaaaatccgtaattttttgtgtgcaaagattctggtccaagtaactgaaaccgctatcaccaaattctattgaagccaactttgtacagagaaatgatgatcatgttacacagcaaaagccctagctaggtagatataaatatgaatgttgtggagaggtacagacaataaacaaacaagctggagctgagatctaatctatagaaaaacaacactcagatcaaaataagatgaatcgagagtttcaagagctttctagttcgctttggatccaatcttgtgcacacatcaaggcttgcacggtactcggtctaagcgaacgccatgtttcactaacccgtctcctttgacaagtttcaaaggcgtcttcttctgatgatacattcaacattggaactgctaacacgttacgtgccatcatggagagaattgggtacttaggtgtgtgaactttccaccagttcaggatgtcgaaatctgaattccggggaaaaagtggctcttctagatacttttctagatctgatttagagtcttgacccggtgtagtagttgtttcgttaatgtacctatcgaattc

SEQ ID NO: 130 - DNA, 92128 bp, Arabidopsis thaliana
gaattcgtagtcgtacactgttaagatgcgaagtaaccgacattgaaatatgtaaacacgcattagttttttaagtatttcaatttcaagtaagtaaagttgttattagttttagcaccccattctacagattacagaaatggaaataaaaagtgagatcaggatcttcagcatcccttcagattcttctctctgctttctttccctcgtgccgattatgataagcatcaaccatcaaacgtgtgaccaccctcacccctgataccaccattcctcctcttcctatagacccgacgtcctttatcacactatgattctgaccagagtcgtcacaagtactgctttgtcccactttgattccattgcagatatctcccatgtctccttcactatctagtgctctcaaaaccttatttcaaacaagttttgtttatagttttcaaattttttataaagaacacatgacatgtataaaattgttatttgttgctatatatgtgggttttgattagtcatagtgctagctgtgcggctacgaataatgttattagaaatgtacctgaaccatgcgtggacgttttggacctgaatacctaacacaagcagcagccgtttcaatcattctgaaaacttcattcttcacgtaatgcttttcgagccgtctatcaactagttcactgaaatcaccggtctcaatggcttttttaagtagtggacgagcctatgaagatgtcaagacagattagtatttaactagagcaaagtccaaccatatatggagatgtcaagacagattagtatctttacccatccaaccaaactctcttctcccaaaggctggttccggtcaacaggtttgcgtccagttataagctctaagagaacaactccaaacgagaaaacatctgatctatcagtaagttgtccactttgtgcatattctggtgccaagtacctgataacaaaagcctataacattagaggcttatgtacttttcaacaatttataacctcttaacctctctatacgtactagttcatcacaatcagatttagaaggctaagcacactgatactgccaaggacttttcttctcaaatggagatatatactttgataggttcactataagagtacccccgttacgtgaatcttacccgaaggttcccataacgcgagttgagacatgagtttgtgttgtatcattgactttggcaagtccaaagtcagcaacctaaacatcaagaaacagaagtctaagaacagataaaactcacatcaactaaaactacagagtcaaaagctcaaagattgcctgaacttcaaactcatcgtccagcaagatgttagcggactttatgtccctgtgaatgatttttgggtgacctgcaaaacaagataaataaagtcgctttgattcagcttctatttgaaactgaataaacatcgcaaaaagtacttacagtcttcgtgcaaatacgccaaacctttggcagaactatagcgattctgactctcctagcccattcaagcactggcctacccttccctgtccaagaacataaccaatgtaagtaaaaaaaaacatgtcaagaaaatcttgtctaatgaaaaaagtggtaaaagagtctcaccatgcaaatgatgctccaatgtttggttaggaacatactcatagataagcaatctctctgaatccgcaatgcagtatccaacaagcgataccaaatggcgatgatgaacacggctaataatctcaacctccgccttaaactcacggtctccttgtccgctaccaaccttaagctgcttaacagcaacaagttttccatcttttagtttacctttgtagacacaaccaaaacctccttctccaagtatgttttgcttagaaaacccttctgttatgtcctctagctcttcataggtaaaatgagtctgaccacttcccatcaccgctgaatcgactgacggtgctgttggagaagaactcggcgaatctgccgtttctttcttcttctgattctttaatctccacattctttgaattgttcctgttatccagaaatccaaaaccacttcatagaagcagagagttatcgtctctctctaatgaaacttttccttattcatcaattgattaaatcaactccaagtagcaaaaataattattttactgttcaactggagacaagtagtttaaatttgaacaaagatcttttctaagaaaagaaaaaaacaaaaggtttacagagccaactagtttaaattgacgatgtcaaggttttaaaaaaaaaaaaaaaaaagtcgccatgatctagtttagaatttagtgatcgatgataagagttaattgtaggcacgtcttcgtgtgggcgtttgatccaaaaatgcggctctctctaattattatgtttactagatgttcacccgccccgcggttttttcggatttttttgtattatttaatttaaatttaatttttatttatttaatcattcactcgtgcaataagcaattacttttaatattaaaaatatttttttctaacaacattttcaacaatgcatcatacatataattcataaacaacgtttgtcttaaaccagtttaagagaaggtagtgttggattctagaaacctaagcatttgatgatagagttccttacttattcttcagtctcagtgatttattatataaatatcataagagaatataaatatcaatttaagagaataacttactcaaatcattaagtaatccacgactattatacattcatactttgagttttgattacaaaaaaaaatcttcgaatatgagaaaactattaaaatagttttattgaaaaatcatataaaataaaaataaatttagtaatagtataattaaatatgtaaaataaaattgaataagaaatatatcattaacctataaattagaagttgaaaagcttaaataattaatagacacatgtcaaatgctaaagtgatgatgtgtcaatcatatggagagagttggccaactttcatatatatgatttgttttgaacatttgatttcttttttgctcactttcattttttagaatatccgggttaccgcgctaaattgatggatttgtttttgaattattatttggaactcttattctctgacccgacccgtttgtgccagaaaaattgatgcatgattttgatgcggcttcaggcctgaaccaggcttttaaatattttgggccttttgatttctactggttttcaaatgatagaaattttggaatgttttccataccatttcatatttttctatcatcagtaattaacaatataattatatatatatatatatatacgtctttaagcatggggcattcggacaagatttcaatttgaaaaaaatagagagatatatctacttgcattgaaattatgttatttcaaaaaataatttattaaatatttcttctttgatattcttgtattattaatttattatacatgaatgaaaaaacagaattatgtgatgtggaaggaacctaatggaagaatcttctattaacacccaatttcacaagttaacaacttaaccttaaggaacagataaagaaaaaaatacgtagaggagaattcgaacactactataataatacatgtaaccgacattgaaatacgtaacctttttcctttttgtcgcatttatttacttggtttatatttatttttctaagttttagtacccttgcccaaattttttaaatagactaatagcttagtcacaaaccataatcacataatttcaaattcaaattttatcattacacattgaatgtgttttttttttttcaaataacgttgggttttctcatttctaaatatagtctaaaagggtaaaatagtaattgaataaaaatagaagtagaaatcagaaaacttgctgtccaagttttcgctttaaacgtagtacgaacaaatcaccacaccgccactctctctctctctcaccttttataactgcaaatccctaaaaccgccattgaaaacaaacctttctccactttctcttttctcaagaaactctctttcttcttttctaatggcggcacaagtcgagatcgaagatcaagaatccgtcacgaatttagacaacggcgaaatcatcaaccccatctccgacaacgcacctaacttctccggcgatgcaacgattcttctccgtgaagccaccttcgaacacaacctcatcaaaaactgtttcctctccggaatgggctcattcgccaccgaaacaacaatcgtcaccgtacgaaaaatcttaacgcagagattaatcacaacgaaagctaaattcgctgtgttcaagcttttcacagaagctatgaagaggaagaacaacggttacgcgaatattaggtacggttggtactctggttctaaagaagagatcgatcgtgttattacgtatgggtttagtaatagagagatcaagaaagtcgaaaacgacgtcggatctcacggtgttggaattcatcttgttcatcatcgttactctctcgctgcgtaagtgttatgttttttctcagttgtctaagttcttagtttgtgattttgatgatgaaaaagtgaaaattgatgatggtttcagggctttagttggtgaaggtgatgaagaagggatcaagaatattctcttatgccgtgtgattcttggtaaaccggaacaaattgtgaccggttctaaacaatcttacccaagttcaaaccaatttgattctggtgttgataatcttgagaatccgagaaaatatgtgatttggagttgtaacatgaattcttacattcttccaacttatatcgtcagtttcaaatctcatcttctcagaggtaacaacaatatacaacttcttcaagattctgtgttttgtggttatgagggagaaattaatgttggtgtgtttttgtttttcaggtctaattggaagagcaaggtcaccatgtgttagcttctctgttcttatgtcaattctttcaaagtcacttgacgctgcaagaatgaacttgattttgactagttatgatgattttagggtatggagttatttctattcaaatccattagtaaatgtgatggtctctctctgattttaattcttgtttctttgtgtagaaacggaaactgaggagagagcagctagttaggaagattagggaagtggttggagacaatcttcttttcaagatactcaagaatcagaggcgttaaaaactgtatagggtaagtctactttaacaagatttgtttttcataatcagatgacttacacataattaaatgtttttcttatagagcaaggtctaatacttttcttgtgaagatgaaatatatacattaataggtttatgaaaagaatctttttcttttagacttgtagaataagtcagatgagtattgatcacacttttgtttttttttcttggcagaggacgttacagatttacctgaattagccaaagttcaacagcagctgatgatacgtaatggagtaggtttgaaacaagaagaaacacacattttcacacataggatatatatatagaatatagtagattgttgatttgttgtaatggaatgactctggaaatcacaacaaaaaagtatactttttttttctttttgtttgtttgtttttgtgtgttagttgtatcaaaccagatttttacgttagtaatacaaaaagacacttggttaaaagcccaatgcccattgcttgcttttgtctctaatggatttatgttaaaaaaaaagagagagtcactatagataatgaatacataaaagaataatcttcctccattaaacttaagagatgttgttgctgctaatcagagagctgatctgttgctctagctgcaaacatataaaagattttagattgatcactattgtaaatgtttttataagtatgacttttacttctacattttggttttaccctttttacctgactatttatatcttttcttctctgaacttcctctacaagcttctcaacactgaaaacacacattaaacaccttatctcaactttctaattaattcttaatccaaaacaaacaaacaaatgaagaagttatgtcattacctttgctccaaaaactgaacttgagattgcagatctttctcctttgatggatatatctgtgggtctttatgctattagttctgtgatttctaagtatttaaggcatcacatgagaataagaacttacctgcactccttcggtttttgagattggattttccgttttcgcagttcgatcaaaaaatctaattaacctgattacttgcgcctgccaagaaaacaaatacagtgtaaaaatgttcagaagccaaatcttaataaccacttaggagaagtgtatccacaagaagcggttgaaacagacaacacacaaaccctttgaatgtcattctgaaccaggagactctgcaacagtgggaggatttcctctgatgtggaagattcacggttcacatgactaactatatagccgttttttggtttctcctgataaggaacattgttttcaaatgtgagtaccaaggaatcacaaactaagaaccgcatgacattattatattcaaagtaaacaaaaattacctgctcatttcctggttttctaacttgctttgtatccgctaatggttcctttgataatgtggaagattcacggttcacaggactatctgcgtaaccattttttggtttctcctgataaggaacattgtttgaaaatgtgagtagtaccattacggtaaggaatcacattctaagaaccgcatgacattattatattcacagcaatccaatactacctgctgatcacttcctgcttttctaattttctttgtatccgctaatgggtgtagtacttgacgtggctcttcaaaagcgagcttctctgctgctctatcgctcgagttacatgcattgctttcattagaaatgataccaacttgatatctggttcaatatgtttatttcaaagttgtgtaagcaaactaatgagatatcaagtttgtatagagaagagaaatgttataagagtacccaagagccgggaggaatttgcgatgaaacgaaggaagtaatgaaccggttaattgactgctactctcactcaccatatcctgtaagttgttggaccatgatatgtcaagacaggcacgcagagatatgccttcatatgacaaaaaaaaacacttgccttttctgagaaatattccaaaggcatagtctgtgacctttgtatcactggttttccttttggtacatctccatttctgttcagttcctgtatctctgaattatagatttcttcatttggaatctgataacagaacactgaagcattgagaaggtacgaaaaaaaactagttttacgtttactctaagatatgaccttacttacaattacaagtgatgcctgccttctcaatgcttcaagatcaaagttccaagcactaattcctctcatatactcatgctgagacaactgttctttgtcaccatttatgcctttgaacaactcagcctctgcctcctgtagagcaaacataagagaaaatgcagaccttaagtcacacctactaatatataaaaggtaagtaatgaaaattcgaagttccaaacagataaggaaattctttgaactccaccttgagctttttaaaacgttcaccaagtggagaaagaccatgaagaattttacgggacaaataatctgtagaccgagcatgtttgaagaaaggatgtttcagaagttttgctgcagttggacgctttttcggatctttaactaagcacgctgcgattaactctctaaatgactgcgaacacgttacagtttaagtgatagatatagaatctaacttttgtatgtttgtgttatcactaaataccacttacctttgagaatttcttatctctgtcatagtctagacgaggaggtgcattttgtaatgtcattagtagcaccttcataggtggatatttggaaaatggggcatgaccatgagcaagctccaaggcagttataccaaacgaccataatcagctctataatgccaaacagaaaagtgttagaatcaataacctactcgctcaatgattgctatgcagatagactagaaaagtgcatacatacttgaaatcatatccatctagttgctgcataacctcaggtgccatcctgtagaaacacattggctaaaacaaaccaaccaaataacaaaacatatacagagataagccaaaacgtaccaacaaggagtcccaacgaatgtattccttgtttgcattctttctccactatcaaacatacatgctgaaactccaaagtctccaagtttaactacgccttttgagtgaatcaatatattcccagcctaaaaaacgaaccatgtaaacaacaaaccaacgatctctattcaaaacacaagacagtaaagtaccttaacatctctatggatgtgaccttgtctatgaagataaacaagagctttaagcacttccctcaacaaagtagcaattataggttgctcaagaccttccggatatacagatttcattaaatgaaaacaagaaccacccgacatataaggcattacaatccacaaactactactgtcgataaacgaacaatgcgctttcaataaattcggatgatcaatcaaactcattatatgaacttccttgcgtattgtttcctacatgaaaaaaaaatgattttgtttcttgtataaacacaaatgtaactttcatacaaatcatatgtcaaaaagattaagaagacaaaccaaatcattcctgcatttttcgagatccaagattttaacagcgacaatctcgttaagagcaatgcaacgagctctatacacagtagcactaacaccttctcctacctcttcaaagagctcataatctttagcatatagaggaaatcgtttcgttgatgaaccagccattctctaattcctacacaaacttcgataaataaccaaaactaacaccaaacgattttgacacgaggcacaaatgcaggggaaaaaacagaacctgtgtgggttgttgttgtcgttgttgttgagagcaaaatgttttgagttatgattaaagatttggtttgggtttaaaggtggcgtagaaggtagaaggaggaggctacgagaaagaggacgaggatcttgtgatgaaggtgagaaagttagattcgaatctatcgtccataggaaaaaagataggaggaagatcttacaacacaatgtaaaatgatgatgagttggtgaaggatccaagttttttgttatggctaacttttttttctttttggtgattttgaccagacaatgtcttgatttagtaaaaatctaatccgatttttaattggatcctctcttttcgtcctcttctgattttttctctctttttcagttattattttgcccttttgaggaaatattaaactaatgccgattttctctatgaattttttcctctctgtaaaataacaaacctttataagtttattattttggataacagtgttaaaatggtacttattaaaaatatagagatttttttttctttttacagtttttattgaattttttttttgttttgtctaaatatagaaaacttaagcataaagatataataagatttatatttacccattcattgaccacttcatcaaatataattgttttgtttctctttaaactgatgaaatgtatttgtgttttttcatataatcgaagagacgaaccgatggacttcttcctgtattaatggtttatgtagataaagccattttgaacatgaggaaaacaaatggttgttgatgttttcgtatcttcttttgaagccttgctgatgtaatctatcagctacttactaaggcccatttgagactctcctcatgactgttctgatctttggcaggcatgaattttaatcctctaggcctttgcataaagctttgataggaagctcagaaactttttcctttgatattttgcacaaacatgttgcctttccaaactttctgtcatgtcttaggaagaaaactagacaaagcctttctttagaaggcacacacgctctgttacgtgattcttaatgttcaaaaatgataaaccgagcttgtgtttggtttagctagaaaccaggtatgtaaagccggttcaaccgttcatttgtcttgtctattatgatttcaaagtccacgataagcatctgatcagccacgacacgacccacaaagaatgtttagctaacatgcatagtgacatttgatatctaataacgatcaataatatataaggaacaaaaagagaagtcaaaatgaatttaaactttctcaaatcgagccaaagtagatcttcactaacctaaacaatcccaaatttgagttcattttccgaaatagatccactgttattcagctttgaaagttatgtaaacaaatgatgaagatttttgtatgaaatctatttttcttataaaaataaagttttggcgacgatatacaagccttttttgacactctatagaccaaatagtgtgggaaaatgtccaactgcacagagaagttgcataggtaaattctgactcatataaaattgattaaggctcatgtaatgcttggttctcacgcatataaaaaaaagtcgattatcgttgacagaaaaaaagtcaaatgatttcctagatcctattgaccgactcttgagaactaagatctaagaagtaaattaactaagggtcaaattctaaaacggaaacagagaaaaattattcgttataaattgtcgtgaatctttgtgatctttcatcagaaaagatgtatagaccaaataccaaaacgacaccgaatgaaaaaaaaagccaaaagacatttagcattgttgttaagcatttgcggcagctttggccttttgaatatcaaatgatctatcgtttcaattcaaccaaatacaaacaaacgaaacaagttattgtataagttctgtcggattatggacttttatttaagccacatgtgtggggacaagcttttctcgatttgtcattataatttcggataagattatctatcaatttcgtgatatgatgatgtataataccatttaattaagatatatggtctattcaagaaaatgaagtttcttatggcttcatataatcatatctacgtaccatattaaccatttagttgaacttacacaaaattttgattaatctattttcttacatatgagaatctaatttttgtttttcttctaaacttttttttaaaaaaaatttgtattcattattgtatgcatgcaaattcagttgttgtattaattaatcacttgggaccatcaatatgtgaataattttcgcggtttaaattaattcgggcgatgtgacattatatccttgatgtccacgtttgaactatcttctgcatcaacaagtaaccatttctaaatttggacacaagcattattctctatgactacaagtacttacattacttgtaaactatcgtattttgttctatgaagtaaaaaatctaacacctttgttaattgctacgtaatcatattcacttgattatttatgtgaaattatcattgtcatccataagtaatcacgcggattataagagaaactaatgtgtacataactaatttacttcaattattgatgaggatcaaaatagaataatctcttctatggtggacagaggattctaatatagttacctatggtaaagttaaatgtcccttttaaccaattacgaatcactttttatgcgataatgcgttccaatttctacggatagtaagtaaaacactattatatgatactactttatcagtttgtttatattttaaaatactaatacagtgcacgatcgagagtgagtcaccaactaaccaacagcgaccaaattccatttatgccacaccaccataaatggaacaatacactgcctaacactatttgccacttccttctcataactcttggtcggtatgttcgtatttacgtggatacttaatgaccgaacatgtggctaatttgatgggaggataatattatgaaatttgctcacatcccaaaaccataagatcataaataaattatatgtttccgccaaccgaaatagtaactgttcatactattttaatcttttttcctgatgttcaatttttgttttatttatttatttagtgatcttggttttttccaaggctattgtataatctttttattataaatcaatatcttgtaattttgttttataaggaaattagtttacatttttaatttcaattttgtaatctccaataaaaattttagtaagaaaagtaaaatcttcactcgaattagttgattatcagacaactacgatatgatatttgggattcagatcactaaatattattatttaaaataacataaacatcgaaaactagaagaaactacatatcacttcatgtggttgctctctaatctattttttccaagtttatgacttataagttaaatattgtattaacatgaggtgggtttaatttatttgtttcgattttattagatccaagtaaaatacaaccttcgattctaaaaagtaacgtacgttttagtagatcacggtctaccacatacattatcacaactatctttgaaccagacaaaatcagtgtggaccgaaaatcctaagcctacaaaatatctaaaagatatctatgttacgaaatttaaaaaatatcaacaaaataaatatcgaaattttctacaagatatcttacatgatatatcttaccaatttgagaaccgtatacaaagttaacatcgtaaaaccattagtccatgaccctggccaaataactccatacgtaaggggaagtgaaagtctgctaatcgcgttgaccatagccacattggtcaagattcacccaaaggcataatattgatttaggtcaacttcacacaacacattacacaagaaaacctagtgagcttctcgaagacttcatatatctccaaggtcaacacgtggaccttaagcaaccttccacgtcattacacatgtcagggcattgaacaagtccggtttttgcttctcgaacaagtggtttctctaacaactaaaagataactatgattctatcgtcagcttcttttcatgttcattgcccatcacggcataacgcgtttttacttcaaccgagaaatgcttagaaaagttttgtttgctctcttggtcaaattggtgaaatgtttttgtaataattgggagagaagaaaataatctaatttgtgtgtgtgtcttttgtattcatatttgtgtgactagattggaggaaaatctgaaagtttattcaaaagtttacggtccaatcatatgtatttttttctctatttcttctggtcaaaaagtatacatgcaaacaattttagacttttttagttcgtaatttctaaagataccgttgcagtagagtttgaatgtttgataataatttgaaaacaaccttgttattctagaatctaaatttattaaacgcaaaaaaaaaacgtattcagattattttttttatagatatggataaaattcatttcagtaatttattatcaactaaccaaaaatgacggatattttgtcaactaatttaagtttttcataaacaaaataatttattaaaaaaatagtaagaaaaggagaggtgttgagagattgggaagctaaaatatccaaccatatataaaagagagcaaagcttcacctatttttatcaaacctcaacaaaaatactctctcttatttcagacttttcagacaaaaacagagagaaactttttgtgtttatgtgttttaagatctgattgataaaaaagatgcaagttatttctccttcgtctccggcgccgagattcgccggaaaagagagattttcagaagtttacggcgaactaaacgacgattttggctctaaactgaagattagttctaaagaggaagaaaacagagatgatgattcatggtggaatcagaacggaactgataaagatgatgaaggaagagaagaagatttctcattcgcaagtgtaaacgcagataattcaccgataaccgcagatgaagcattcgaagacggtcagatccgaccggtttatcctctgtttaaccggaatattttcttcgatgatccagaggaaaaaactttacgttcacctctcaagaaactcttcgttgaatccacaaccacagaagaagaagaagaagagtcagatacggtgggtccatattgttcatggacaaatcgtacggtggagcaagcatcaccagagacttgtcggaaaagtaactcaacagggttctcaaagctatggagatttagagatcttgttttgagaagtaacagtgatggaaaagatgcgtttgtgtttttaagcaacggctcttcatctacatcgtcgacgtcgtctacggcggcgagattgagtggtgtggtgaagtcgtcggagaaagggaaagagaaaacgaagacggataagaagaaggataagatgagaacgaaatcggcacatgagaaattgtatatgagaaacagagcaatgagagaagaagggaaacgaagatcgtatcttccgtataaacatgttgggttcttcactaatgttaatggtttaaccagaaatgttcatccctattgattaaaccgatctgtcgtaccaaaatctctaccgacaaatctttgccttttgtatatatctaaccttttttttggtttctgtgtattataaaaccttctttttgtaagtaaaagtgaaactttacttattaacttttcgtttgtatcatttgattagttttttttcttctttgatgtaaagtattttttgattttgaaagtagtagagaaaagattcatcgatcttttttggaatttaagtttgtcaataatatattttggtatatcaaaatttgtccgcacgttaatttttttattttttttattttgaaagtaggaattaattttttactggaataaagtaaaacttgttcttttaggcaatatattatctctatctaattgattaacgatggccgcagatatgtaaacacacatttttagagatggctataaatgatttcctgaggcatttatttttgatagcttagtttttacaacttctgtttaccgacactattaagttaggtatcaaattatttaaacatagtaaaagtacaaacctgtattggtagtgacaagtgacaacacattacacattatacatcacaccaaactcaatatgcctcctaatacaagagtacatacagctatagctttaaaagtgcttatattatatgtaagagggccagataaatatttgggccaaagtaagaatgataggcctataattcgggtccaggtgactaacaccattcagaaatagtcatgccccattcatcatcgaaaggtatttgaagtcaagtgagagtttatgctgatgaatggggcatgaattgaaacatcaagcccaagaaaaagtactggttgtgaaaattagcaattttggttgttttaaatctaatagcccattacatgaaaatttgtagtgtcgctaaagttatctttggtttgggttgttttaaatctaatagtccattacatgaatgagaggtgcaacttgcaagccctattaacggctagtcatgaaattacaacattaccataaatttatgctatcctgatctgaatttatatagtctaattttcgaagcgaaacagatttcaggtcttggataataatttcatcactacttcgttcatacattagtttagatccaaaagatatacaaaatttatataattagtagaactgttgacaaataattattaaaagtaataaatggtctgttatagaaatttgattttaacttttgttatattagtgaatttactttaaatagtagaacaagttataataaatatgaaagcatataaaaagaataaaatctcatgagattatcttctagcatagttttagtgttttctcataatgtcaataaatatttacaggtcttattatgatttttactaaataaacagcagaaacaaataaaaagaaaaaacatggaagaagaagaagaagaagaagtccagcttcactcacctttcgctttctctatcccataacagaaacccccacattgctcgaacggtcgtcataattccttgaaacctcgaaaatccaaaaacccatatccaatcttcttcccatataaattaagatttttatttatttatttgtttacttatttcaattcccaaaatcctctgcctcatcatcttcaaactgttaccacgtccatagggttgtcgaagagctaggaagagccttaccaagagcttcttcttcccctaacatttaggtatttcattcgtaatttatcttctttttaatttaattattgtcgattaccaaaacccttttttatactaaaaaactgaatccatttttccacactaaaaggagaacacaaaaacttcatttcaagttcatgtttgaaaaactaagaagtgtatggtttgtttgttgacaattaatgagcatttttttcccaaaatacgttagaacttaatatgatagaataaaacttgaattattcatggcaatgagtatagtcatatacaataatggttgatggaaatgaaccttacggtccaatgaaaagccagcttgcgttacttgagcatttttaagccccaaaaaagtttgaaaatatgtataaaggaatattttatatatggaactaaagagtcagagaaccattccggatttagatcatccatctattttaatttgttgtgattcagccatcgcattattagtcttcagaatataataaaattataattcagttatgaatttaataaattgaatgccgacgtgagtagttaataatgtagtcgattgtaagtaacaatgagaaaactcctatactttatttttagatgtatttgtaataataagattacgggtttggactggacaggttggtaggagaagcaaaggaagagatcatttataatggctcctgcattcggaaaatgtttcatgttctgctgcgctaaaacctccccggtaagtcccagcaacaactcaaatttgcttatgagaaaaatactcaagctatttttgaaacttcgagaggattattagattatagtatgtatataaagtgacgaaatgtatatagagaaagtaataattaagtaaactggtgacgcgtagatgccaactggcaagtccgttaaaaacatgaccgtgtcagcctgtaaggcttgccttggttgacttatcctgctttgtcattggccaccggcctatcggaaaagacgcagaccaatttgccttcaccaaaataaaaattactacttactaccatatgctttttgccctgcgtttacttttcaagtcgagatcatttatttggtcaaatgaggtagaaaaaaactattctagtcaatgtagacattcgaatgaaatttgcatttataaaaaaaatgtacttggaaattcaaatgggtttataatttcattttaatcagtaccgagacatacagccacatgcttaattattcctcctcaatcaaaaccatttcaccccaaaattttaaaatagttttatcaaatcaccatcccacaaaaagattttttaatataatataaaccttcccatttttgtggagtttcttttttttttcccttgtaaaaaagaaaatgtaagagtagaaccaaatggcataatagagctctaggcctataaataccaatatccatctctactactactgcattaactgatttcacattcttcgataaggattttactctccagagaaagaaaaaaaaaacctcctctgcttttgtgatcctttaaggtttctctcatcagatccaattttcatgtttcaacatcgtcaaatttcaccgattaaaattacttgttgttgtttgtattcattaggaaaaagacgaaatggcaacggaatcgtacgaagccgccattaaaggactcaatgatcttctcaggtacacactctctctgactcatagtaccatcattagaaagtgtcggcatattcctcttttttttcctcccacaatttctccataatcaacgccaaaatcaaagcgttgaatcggaaaaaaaaatcagagttttttgttttcttttgatttgcgcgtttgtgttttcttcatgaccaaacattttggaatccgtacacgtacgacagatcctgaccgttggatcaacttaccttgggaaaaaagtttcacatttccgcgttttttttacagtacgaaagcggatctcggaaacgtcgccgccgcgaagatcaaagcgttgacggcggagctaaaggagcttgactcaagcaattcagacgcaattgaacgaatcaagaccggttttactcaattcaaaaccgagaaatatttgtaagtatttaaattactaaactttttaacgttatttaaggaaaagaatataattaaattcgtttttgttctgtaaagaagaattttcatgacggtggagtggtccattaatgataaacctacctttattttttcttattcacttagcattactgtttttattcatgtgatagtgctaaaaaaaggtgattaaaagctaattaaattgtattaagaaggtatattccaattagtatatgcaataacagaaacataaaaaggtggttttttaaaaagaaattctgaattttttttaaggttgattcatggattttgatgaaatctctctgttcataatttttttcaggaagaatagtactttgttcaatcatcttgccaagactcagaccccaaaggttttagcttttctcaaatctctctctttttctctgttcatttacttattttcttctttgactaatacctaaaaaataggttaatacgaacaaaagagtgtgacaagctttttaataatccaacgatgatgtttgactttatgaattagcaaaaacaattattggaaccaaagatggtccactttcttattatagagttaatgaatttgaaaatgatgttgattttttttttttgattatggcagtttctggtgtttgcttgctctgattctcgagtttgtccatctcacatcttgaatttccaacctggtgaggcttttgttgtcagaaacatagccaatatggttccaccttttgaccaggttcattaccaagccatttcactcttgttcttgtctgagatcaaataactaacaccaaagtggttttgataatttatcagaagagacactctggagttggcgccgccgttgaatacgcagttgtacatctcaaggtacatgaacaaaatatacctatttttaaggatagacacttagattgaattaataaataagcaaactttgttagtattcttataagttatcacttatcagtaatcatccaaagtttggctcttttcatagtgctcattattttaagtcgttgttatgcatttttgcttgcacatggttcttactaaaagttgatgtctagtcactctgttatttggacccatttcatccacctaaaccctgttctccttttccttttagccactaggattatcttttttgaatcatttttggataatgttcgatattagaaatgggtcttaatgcatcaacttgcaactacttttttattcagagtcaacagttcactttttttaatagtatcaatttatttgtaggtggagaacattttggtgataggccatagctgctgtggtggtattaagggactcatgtccattgaagatgatgctgccccaactcaaaggtaattactaactcattaatcttgatttagcctgagttgtgaatcaagattgttcgatatatgactttcttgtgggataagtttgagtctttgagatgataagattaatcgatctctaacacgatggaaatcctctaaacaatggcagtgacttcattgaaaattgggtgaagataggcgcatcagcgaggaacaagatcaaggaggaacataaagacttgagctacgatgatcaatgcaacaagtgtgagaaggtaataataactatctttgctctgtttacttatgttcttgagaaatggcttatcaataaatgtgttatcttgtgcaggaagctgtgaacgtatcgcttggaaacttgctttcgtacccattcgtgagagctgaggtggtgaagaacacacttgcaataagaggaggtcactacaatttcgtcaaaggaacgtttgatctctgggagctcgatttcaagaccactcctgcttttgccttctcttaagaaagaaagctaccggaacatataaaactcttttgagataaaaaaagacactttgactcatctttcttcattctctcatgttgatgattcctctccaacttctttgatttctttttgttaattcaaaacttcaactttgctgcttctatttcaaaagctcaaacaataaagctgtaaccaacgtttgaaacttctatatttgtctaattgatgtttgaacgaagatttgaactttccttctttctctctttttccagattatatgtgtatgttaattgttaaaacttcttggcattgaagccattgatcattacaattttattacataaaaacttctatacggtatcattgtcccatctattacctagaacgaaattgtagtgactattcgttttagattagcttcttttttttgttgttgcaaaaaaaattattaactttttgctatttaaaagtagttgatttagaattttctttatataaatgtatttatcaaaataagtaaaggaactcaaaagagtaactattgtaaatagaatatttctagaaaagtaatagtaagatgatatgattcctaaacgggaatttgcagaggcccatttaccaagttaaatacgaaaaggcccacctaaattggcccaattgtgattgccgacttattgacttctctatatattagggatttgccgaacgatgatgatttctatttccatttaatctaactgcaagagaatcactaaacttttgcgttccaaattgaagaagctacggtaagcgtttcattaaccaaacacctctctgaagttgtctatttcattcattaatcgtagtttcttcaccagttgttttgatatgccattgtcttgactcttaagtttcatcgtcaatttcaattatagggtttcggagataattagatattgcttcttccttttttcgttgtatttgtttaaatcctctctgctttggtctgtgcttgaaacttgcaaactaaatacgttggatctgttttgttgtaggcaactcttgaagatattggtatggacatgacagaattaaatacccttacctacgatgatctcgatagtgtttcaaagctacaaaaaagtcggagatatgctgatataatgcagcaagtggaagaggctcttgaaggatctgtattagagtacaagaagctaatcgtggactgcaagcagctcttagttgatattgagaatgaaatagtcatcgtccaaaactttatccgtgacaagtatagagttaagtttcaagagcttgagttgcttgttcctcacccaatcgattatgctcgtgttgtgaaaagaattggcaatgagatggatttaaaacttgttgatcttgaaggccttcttccatctgctatgatcatggttcttttagttactgctttaaccacaaaagggaaccaactgccagaggatgttctgctaaagacgatagacgcttgtgatcgggctctggatcttgattccgcaaggaagaaggtccttgaatttgttgattgttgcattgtgtgtgtcacattctaaacctaatgtgcttcttggtctactcatagccatctcatgcttcggaaacaccctcctcctctgcatctggatacaagtctctggaaaacgtaaagcatatcaatgtagctgccaataggtactatatatttctttccaaacaaaaatgatggaactctgtttatctttctctttacttacatattggttctgtgatatcaaaagcaattaagaccacagaaaaccgttgaggcttaacctcaaacatcgaacaaaaagaccgagactcgaactccaacaatctaatggtttcccaatttgtcaaaagtgtactataattatatcttctaaacacccaacaaagtattagccatcaacttataatactctaaacttgatttctctaaatcttttcataccgagacatctaaagtagcactatcaagattactacccgtgacctcagcctcaattacaaaccgggaggtcacaagagtttcttataaacacggttttgaagaagctaaaatggtaaaggtaatggtgtataaatagaatactaagtgcggctaaaggtttgcaaatgagtagtcttatggtggttgtaataaaacagaggactggttctcgaaagagcggcaactaaatggataggtggctgtttgaattttgtggttggctgtatcgctttctgttgcgattggtcatcttcctctgcttttattcattgttctgttactgttaggctgaacttttgtaactttgcaagtacgtaaactaattgtaccactctgataagtatacttcttgataataacattacattcattttatttcaaatttacataccgacataaaccaaacattcctcaacgataaacaagatgaaaaatagaggtttaaaaagaatcgacaaataagtttaatgcgtatacgttaaacctccctgtaattgtgtacaaattacttaagtgaaaactgaaaagtgaaaaccttttaaaaagttaaaacgtgtctgtatatttgaattgattttgtgggttaacgttgtcgattgactactagatgtgtatgatattctctatatttgaattgattttgtaacaaaccatgcggtcataagagtttcttctaaacatggttttggagatcctaaaaattttcggtaacagaaaacagagtgcggctaaattaagcttcggatttacaattgctaacgttgcttttttgctgtgatcaatctttttcttcttcttttgtttattgttctttatagtttggctaaactttgtaactcgagctgtgaagtactttaacagtatatttaataataatacaataacattacattttttaggtcaacaaaattatgttcaaacctttaaaaagatgaaaaagtgtttctatagttaaactaatcttgtggattgaggactagaagtatactatgaaagtcacttttggcaccaaatttctttgctgtcataaatatcagagagtttgacaaaaaaaatttgttcatgcaattacacataagtaaagtgggagccatttttacaattttgtttactaaaacgtgtatgataatagaaaatctgtcaaaatctgtcaatgtcatacttggtatccaataatctctatgctaattggccaacaattttagtaagtttttaacatatttgtggttgtcaaaatttttatttttgcttttagatgtaagcatgaaactaaattcaagtaaactaaaaatgtatacgttttacaactcaaaaagttaaactaaagtcacaagtcacaacgttggtaacaactctgctttccacacaatatatatcacatctatgtttttgtctcagacacataataataccattagagaagaaagaaaatggagatatataatttcgaaaaaattaatgtttcgaaacacttcctgaaaatattcaattgaacattatgtcacggttgcctctgatgaaatcctttaaaaaaatggttaacttgttatctatattttgacgtaagattcaattgtattcgaagaaaataaaaatattaaaaacgagtacgacgacgaaagacaatctgtcactttcatgcatggtatccaataatctctgtggtaattggccaataattttagtaagtttttaacgtgtggaactaattaaaatttcttcttttggtttttagatgtaaagcgtgaagtataattcaaggatatacgcgttttatgactcaacacgttagaaacaaactctgaagattctctataaatatcatcaattgtgtgtgtttgctagtcctcatctatctcaaacacataatataatatcatcagagaaaaacaaaatggataattcaaatttcgaaacacttcctgaagatctacaaaaggagattttgttatggttgtctccaaaatccttggtgaaattcaccctcgtctcaaagaaatgtgcatctattatccgtggggaagaattcaaagctctttacatgcgccgatcaatgacaaggcctcgtgtgttgatcgttgccaatgaaagcacaggtgagaagtcattggtgtttcacactttgtatcaagaggaggaaccattgttgtcatcttgtcatcaacaacctatgcgtatcaccaacaatgcaccacgttttattgcttctcaaccaatcctaggtttgatctgtcttcgaaatggtagtgaggttgtcattcacaatccgggtacaaaaatattcagactttaccgaagatcaaagctccatcattaagtttcaaaaaaacttttttcggatacgatggagttacggaagtattcaaggtgttatgtataacagggccccgcgggtttaagccctctaggaaatgccatgtttacacgatggggtccggtaaaaattcttggagacggttcaaatgtaggaaacgtcattatccatctactgaagtactatgtaaagaaggaaatttgtactatggagctcagtccattagtcgcaaatctctattaatgaggtttaatgtgaggtcagaagagtttagtgtcattaaattacctaatcagcaagttaacttttgtcgtggttggaacttggttaattacaatggtaaaattgccgtagcgaagaatgttgacgtcgacactggagatttgcaaatgtgggttctagatgacatgggagaatggttaagcgaaatcattacgattcctcgttggaaagaaactaccaataattgcacgtatcatttcaaaggtaccattggaacaggagaacttgttttcatagcacgctattttgttgacgaatcacccattgtgttgtattacaataagaacacgaagaatctcagaagatttacgcttgaggagttgtttaaggatcttcctccgttgaatcattcttcttatcataatattcaaatcttcttgaatcatattgatagtacttggcttatgtgaagaataagagttggttgttctgtctttcaagtcttagtgggattgttaatctaaatttctactgtcgttaatctttagttattttaaataataatgttgtctcttaagtggtactggtcttataaggattgttcgtattttttatttatgttgtcgttaatcttttatttatgctaaataataatgttgtttctcaattaattagtactatcttattggaattgttcattgttatttttcttgttgtttgtcttaatttctaagaaataacaaaactgaagcttcccaaatactacccacattttactaaaactagatcatattcttttcaacgtactacagaaagtgcatttgactagctcgtaacaaaacgtttgctaaaagaaaaatataagatacccgattgcttgcaagagagaaacaaaagatagggaatctctcaagtgttcatctactagtattatacttgtagttagaacttcgatttcccgattggttgtaagaattataatggaagactcctcttagcaaacaattttgtttaccaaaaaaaaagaaagaaaaaaaaaaaatctagaatgcaagaactgtacttcttcctgatactctacaattgctttctcttagtgttttttttttttttttttttttgatgtttccagaaacgaaccatctaaagtagcaccatcaagaccattactcacgaccttagcctcaataacaaaccggtggtcataagagtttctcttaaacaaagttttggagaacctaaaatgatgggtagtagaaaagagagtgcggttaaagattcggatttgcaattgctacgttgtttttggttgcgatcaatctttattctctgctttggtttaaatattgtacttttactgtttggctggacttttaactttgtgaagtacttataaccaacaataacactttgaatagtataattaataataagaacattacatcattgtattcaattttaaatcctaccaaacaatcttcaacgagtaacctgatgaaaaataaagatatttaagagaagtggtatgtaagtttttatgcgtgtatgtgaaacgtccctttcaaaaattgtgtacaaataatcaaagtgaaaagtgaaaaccattaaaaagttagaaacgtgtttctattgattctgtggattgtgtacgatgaaagataaaccttttaagtcacgcttaacaccaaatctcttactaatttgtaggttttgacgtgggacatatttttactcatccagttacaaaataattaatgtgaattttctcatctatattttgacgtatgattcaaatctcattcaaagaattaaactactaaaccgtgtacaattgaaagcaaatctgtcactttcagtttttatatgctaaattttcataaataatattactttacgtgtgattacatctttttctcatgcagttacaaataattaatcaatgtgactcatgtcatccatattatgacgtgtgaatcaattttattcgatgaattaaactactaaaccgtgtacaatgaaaggaaccctgtcgatttcatgttttatctaataatctctattctaattggctaataattttagtaagtcgttaacgtgtggaagtgaaacatctgctttaatttgtttaaatgaaagtaaattagattaaaaatatgcgcattacaaaactcaacaagttaaactaaagtcacctactcacaacaaactcttgagatttgctataaatatttcacatctgtgcatttgtctccaacacaaaaaaatatatatcattagagcagaaaaaaaaaaaaaatggtgaacacaagtttcgaaacacttgctctagacatgcaaatagagattctggcacgattgcctctgaaatacttaatgagatgcatgtgcgtctcaaagaaatgggcatctttaatacgtggggaagacttcagaagtgcttacttgctccgatcaatggcaaggcctcgactgttgttcgtcgctagtcgtagccgcaaattcacacgcgaaacctgctttcactctgtttatcaagaaccaccattgttgttgtctggtaaacggcagatgcttaccgataatcacatagcaccagttttcacggtttctaatcccattcttggtttgctctgtcatcaaggatataataatgagattgtgatttgcaatcccggtctgaaaaagtttcggaatttaccgcaaatccaagtgcctgaaggagcatccgtgagaagttttttcggatacgataaagttgacaaagtattcaaggtgttatgtgtatgtgtaccacagacacagttcggagctggttggacatcaaaagaacctaagaaatatcaggtctacacggtgagatcggatcatgaaaaaccttccttttggagaccgatcatttgtaatgatgatcattcagtagttactgatgaaggactatttaatggaggtttcttgtactatggagctcggtcgagttgcaacaaacctatggtaatgaggttcaacgtgagttctgaagcgtttgctgtcattaaattgcctgaggaagtcgacattgattatcattggagattggtgaactacaaagggaaagttgccttagtgaacacctttgactctaaatttaaattcaatggagtttttgaaatatgggttaggaacgaggttgatagaaagtgggacaaggacatcattaagattcctcaatggacagaatctgttgataattataatgtttatttcaaaggtaccactggaacaaaagaacttgttttcgcaccacccaattggttcggggaaccactctttgtcttgtattacgataaagccacaactaacctcagaagatttgatattgaaggaatggatgatcaacattattcttttcataccttcttggatcatgttgatagcacttggcttatgtgaagagcacgcgttggtccaatgattatcagaaactctctttggttgttcagtctctcaagtcttatatttggattagttttcatttctattgtccttataatctttatttatgctaaataataatgttgtctctcaagtagaactagtggtcttgttagttttcatttataatgttgtttaatcttcatttatgctaaataataatgttgtctctcatttagtactatcttattgggattgttcgttgttatttttgtcgtcgttaattttttatttatcctaaataacaaaacttaagcttcctaattactcaaactagaacatattattttcaacgtactgcagaaaattcatttgactcgtaaaccaaaaacgtttgctaaaagaaattataagataccccggttgcttgcaagagagaaacaaaaaataaggaacctctctgtgttcatcaactagtctacttgtggttagaacttcgatttcccgattggcaacaagaagtataattctatcttctaaataccaagagttaccagcgatgcaccgacctattactctaaaatggctttctcttaatgttttcagaccatgactcactacattagcctcaataacaaaccgggcggtcataagagtttcttttcaagacaaggttggtaacataaaacagaaaccggtcaaagatacaattgctacgttgctttctgttgcgagagcaatctttattctttgcttttggtttctgttcttttactgttttgctgaattttttgttcaattttttccagttgggatctatttaattttaaattctaacatgaaaaacaatattccgcattcctaaacgagtaactggataaaaaaataaagaaatttaaaaagaatttgcaaataagtttcgtatacgtgaaactctccctgtcaacataattggttcaaagaatcaaagtgaaaattgaaactaagttaaaacgtgtttctgtgttagaatttatcttgtggattgacgagtagatgtgtacgatgaaagaaaacctttttaagtcacgtttggcaccaaatctctctgctaattatttagtcataataattagtaagttttgacgtgcgacaccttatttttcttgcaattgtgtacaaaaaaaaaaaactaaagtgaaaaccttttttaaaaaacaattaacttgattatctatatttcgacgtgtgattcaattgtcactagaagaattaaagagatacctgtcactttcatgcatggtatccaataatctctatgctaattatctgtcactcacaacgttggtaacaaactttgagattttctataaatatatcacctatgtgattttgtctccaacacatattaattatcattacaaaagatctctggtagttagctttaacctgaggtctgaagcgtttagtgtcattgaattacctgaggatgttaacgttgaccaatattgggatttgaggaattatgacgatgaggatcgtggtttggaattggtgaactataaggtgctattgccttagtggatgactctgacttttcccatagagttatgaatccatggagtggcaagaaagtttttcatatatgggttaaaaatgaaatggcaggaaattggttgagaacacccattgagattcttggctggatagaaacaaattagaataataatgaattatcaaattgagacataacaacaacactataacaaagcactatgagaccacacgtccacaccacacacaaaaagaaacattatgacactaagctaagtatacatttgtaagctaaataaatagaccgaaacacacttaagacaacagtgttcataaggcccatattttgaggtttgaactcagcccacgtaaattttggctacacctggtctaattcaggcttgtgattgctaaaaacttgaagttttgtattgtacacaaatcaagtttttaattattattttttgaccttttaaaacatttgataacactcatctgtgaaaaaagttaaaatattttcacttttctgtacggatttttctgataaaaaaaataataatataaagtggtaagtcatgatatcaatcacatatatcccgcaattatacatcacatatattggcaattatgaaaagacggacaaaaataaaagagtttcaccattatctcccactagttaaaagtcttttgcatgagttaaacatttttttatcataagtttcagaagaaaaaaacatgataatgaaataaagttctaataaataaagtggcaagccaatagacttgcgtggtggtatcctacaacggaaaaaaaaaaaaaaaagtataagccatttgatagtaaacagatcaagttagttaattacgcccatacctataaacacaagaacacaaactaagaaacataacaaaccacattaataatgctgtactatttgataatgatgcatcgacgtgacatcaccttatttacatttcattttcatatatgtacattacatacatataattggcattttttgtttcttaacatttttggaagcaacacgttactgtacaacataacaattacgacatgaactctttcatgatatattacctaacaatggaaaaagcaaggacttgttcatgggtctttaaacaataaaatcaaactactggtatttaattaggaaaattgatttgtaaaattggagatgcataaaaagaaaagaagaagctatcatgtgagcgaaggtaaagaagcctttgggtcaaaactcattataatactttgggacaaaccacgtctgcgatggggaccttcatcatttcatgtataattcatacaaattctaatgtaataagggacgttatgattgcacattaagcatgtaattatgtaagagacttcatttttatagacatgagcattcgagtttattatgccttaattgtattgagctagatatagtagaattttaatttgaaatcttttttttttgcttttaatttcgttcagcaaaactaagctgaaatattttttcctgcttatatatatacatacatacagacttcagtttaatttgttactctacttttttatctatctttaacaccaaccagaccactcatctcataattttacattgaattatctatgtaaatcaaccccacattgatatagttgtactgtaaaacatagataatattaagtgatgatgatatatagttttatataaacgtgagaaatttcacgaaataatagcactactctacccaactctaccactatttttaagtgaaatttatgtcacaaaaagttttttgagctttttttactgaaaagttttgttttcaacgtaatgtttactttttatccaaaacaattaaatgtaaatttggaaatcatatcttaaaatctcaactagtagtatatatattcaggacgagctggagttgtgtgttgcttactgagattgattaaattgttggatcgcattctcatgcacgtgacatttaataattaatatttttgtctttggcatctaatcacgataatatatacaacttactctattttctaaaattgccgttttgtgtttttattaacaaatgggatttaagtattatagaattaccgcttaaaagcttgtttattaagaagaacgaagtgctactaaacattcaaaccaaacaaaaaaaataaccaagtgttgaactacttattcatttaatttcagcagtcaaaactgttttacataaaaagcatcaatgtgattgaaaaacaaacttaacgaaatctaaatgatgcagaacgttcaaaactagctcatttatcagttatatcttaattagttaagattagtagaagatcataatttttagtttaaaaaataaaattcactgtatatgttacagtgttagtcattgttaaagtttcatccctttgacgaattaacgatcatagaaaattttggattaatgtagtattttttctgaaatccaaaaaaatcacattctcttgaattcagtattatattgaatcagcagatccaaaagtcaccaaatatctcatatactttcatcactaaagatttctaaaagagaagaaatcacatgtgtaatatgattacgtaaataaaatatcactgctacatcattcatcaacggtgcctttttgtaaaattaggatggaaattcccaaaatatggaacatgtgaacgggacataatacgctagatgtcgtgaatttttccttagttttatttgtttaaattatacaaaagaaactcacagttctgattcacagttctgtgaaatacgtcgcctctgcaagaaaatgcaataatcaaaaataatactatacaaaattaagattatgtcattgcttacaggaatcttttgcaaagaaaaatataactacatttaaaacttcaaaaataaatactgacgtcacataatgcatatttggtctataatatatacagtcgtcacatgttggatgattcaacacatggtctctctacgctatgcggcttgcatgttaatttgattaggacgttgattaatgaataaataatgagtatgcttcattttcatacactttctatatgtagtatgaaaaggaaatcaatattggatcaggtggtgcattatgtctttcattgtaactaactattttcaccatttataattaaatgtcgttttagattattttatttgaaatgtagaaaacatctaattagaaatggaaagagtaatattattagttaatttcggtagatgagttattcgaattgtacataagaaacaataaatatgacagtgtttgtgtggatctcgatgcctatgagcctatcttttcaaaagtatgcccgaattatatgctttggaatgactgagtgattaacatctacacaacagttaacggtggagagcacaaacattccctttgatctaaaacatctcaactttgactgtgaaaatataataaattggatatgctcactaatactacgactcgaagaaaactcgagataccgatttttgaagtcctaacatgaatatggcactgcactaaataggtacggtactaattaatgttatatacttatattgggtcaagcctcgtcatgagggtttttaattagtgtaaatagctcatcatcattaatgagattcgggcatatgtatatattatgcgaacatgcattttgatctcgttttgcatctatatatgagagctagcatgtgcatgtaatgtatgtataaatcacgacagagtatgtctgtcgtatagcatagaatctatactttcaacgaggtcaagttctgtcttaaatcttaattattatatatactccttaacatattgtatttaatacctaagccgcttctcaataatacaaaaatgcgatatttctatgggctctttaaaaggatacgtattctgttatgtatagtgacatactgacacaattacatatatcatatatttcaaatggaactctaaaatttgagaatgaggaccaaagtatgagaaatatcaactaaaccacaaaaatatgtagagttcacaaattactcaatatcatttttccaaaaaaaaaaacgattttaccatattattaagaccatcattattgatagtttcttaggttagttctttgataaagtaggtcttaaatttaatattataattcaattaattgttaagaatggctcttatataagagccaaatctaatgtttcttaggttaattcttagataaattaggtattaaatataatgttttaattcaattaattttaatttttagataaattaagtattaaatctaattgtttgtcatatttgtttaaaattttatgtcatgtatgtttcaaattttataagttgtaataattattaagttttttaaaattataatgttactaatttttttttcaatttttttttaaaaaactcaagttaagagtccaccattgcatattgccaaaatttcaatctcttaaccaaattcttaacttcaaaattttcaaaattaattataaaaatattcataagaactatattaagattatgctaagaaactaccattaatgatgctctaaggagttgtatatttgaaagaaagtgggtgtgtggcattaatttttattagatatatatatataacattttttaattagaacaataacttttttgtttttcttggtcaagaaaaaacaaaatcttatactttactttttaacgtacatacataatattcctgtcagtaatttaccaagaaacatgcgcaggggagcataaagattacatgagacagtgccgacaagggccacaacaatgatttatgagtgcgaaagaaaggctgtaaaaactcctttggttcatatataaccaccaagacttagaacgagtggaaataaaacatgttataaatagttaggttcttttcttaaaacatattggtagttttacacatggcaatatattggttcgatagacggattttaacgatcaatcaccaatatattataactaataaatcatttacacgaatttatcaatcctcaagaagttaaaacgtggttttagaagagtttgatctttaagtacttttattttgttgtactcattttacaatttgtggagcaattgaattccatcgtcccgcatctctcccatgcacgaaaagaagagaaagctcgaaaataaagcaaaagggtgcataaataaaagtagacatcaagacagtgtacgagtgaccacaaacaaagccacgcggttttgaattttagattctcataatacttactagctaattaacaagtatgtgttaattcctttgaaggcccatgttgtaacctctctttcttatatataaaggtatgtgttaaaaaaaaaaaaaaaattttacaagtatggtaaaaaagaagaaaaaagtatggtaatatgttgttatgattgtgacattgtctatcgtacttgacttagcttgcagtttacaacgaaaatgcacgatcaattccattattagattactacaaatgttggtctcgttggtacttttttcttattattattacttcaattgaatatcaagttttattaagtttatataataatttgaatatgaatgcatgttatatgttagtatttatctgtagcttctatatgataaacaaacttcaattcatgcatgacaactcaacttcaaattagttcaaacttgtaaatatagacgctttaacttttccgaattaacaatttcgaatttagttcaagcatgtaaatatacaagtattagattcactttaataaaatcataaaatataccaagatataatgttgggttaatatttattgccaattttcattgcttgtaataagctattattgccatgtaaaccataaatatccatggccatattaataggacaaggtgacaaaacttacatccatgtcactactgctgcaaacttgcacttccaaaagaatgtacatgtcatcatcacgtcatgcatacacattacatatatacacatttacatatacgtatgtggaattgcatatatcagtccacttatgggtattttagttgcattgtgtatataagtggcgtgacgccttattgacactaagaaaaaaagtgttggcaaaagcaataaaatctgtagtttaatcgcatccataaataatacgaataattaaagttaaaccctcgtactttgggagacattgacacattgtatacaataatacggggaccatgactcatatttcatgtgactgattttacttttatagtatacaccctaatagatattattggtttttaaaaatttattagcatcggtatccaagtcaaatcatactattgacatgagttctcggcaaatttataagcagaagtccaatagttttagtggccaatctagcaacgatgttgtttgatattgaaacaattctgaaacttccgcgacaaattcatgaaactcagatctctaaaccaccccatcgctacgtaaggtttaattatatcacaaaagttatcttttaagcttgtggaagtttttaacattgaataaaaatacgaaataccacgaaatagtcacagccgcaacacaacaacaattgaacaaaaatattagtcacgaacgtgaactcatgatgtcgaataccacaacgacccctatcgtcttccacagtactactgatttgccactctcacgagctttgtcaatttcttgccgcaatcggacagagatcgagataatgctaaaaagacgaaactctattctaatcttaatcatttgttaaataatgcgatttttggggttcactattaacgaatcttactcagttcttccacttattacatcaacacgtaccattatctttttttggggctaaaaacgcgtctcgttgcaaccatttagtccatgacacgtagtatgatgtcagacaaaaattgtttggctttttaaaatcgaactggtcagaccgaaccgtgcttccggttgtcgatcgagaactggaggactagtgtatagtggatgaaataaatgtaaaaaatgcattttaatttcgaggatacaacttaaaattcaggcccgacaaaaatagttactccaataatgcaagctatgctttatcatggagctagttatgtaaaactagtactatgaaactaaccatttaacaaacttacggttaaagttgtagatagagttatgggcaccggttttactaaacaatacatatgctttgaacttttaaagttgagcctaaatctatagtccaacactatgaatacattttcgagtctctccctgtgattgatgacgtacccagttatagaagtttaattggtacgtacaccattagttgcatatgtataatatatccatatagtacgattcaaaaaaatgacatttacaaatgaaaaaaactaaattatcataagacgtcatatctattgaagaatatgtgtgctttcatcctttttttttggtagggttatgtttgctttcatcttgatttgaaggaaatgtgtgatagtatatgctacagtaaggattaagttataacgaagaaagagattcatatctaaaatttaggtgtatactattttggaaacctagttcaattcaacaaaaggttgggtgaaactaactttctagttaccaaaattgaatgttttaaaataaaaatcaaagattcgtcatcagacaaccaacaaacttctacacaaattactataaatgggttttactgcagtactttagtagttgttggtcatcagttactaacttactatacatagattcactctaggcttagagtagttgttggccatcaattgttgtagcctttttttggtcaaaggtaaattgagaatagacagtaaatatagcttttgactatgtatagatccacaactgcactcaatttaaaacattaatgcattttgcatgcattcatatcatccgttcatgagattttatacattagtataagttttacacgacagatgttaaaatgttgaattaaatctgttgtcgccattgattttcatgctcacttaatagaaatgtctaaaagcgtgacaaaatgttatattgctacttaagatttttttttttttgccaaatttgctacttaatatatgatagttcaaaaccatgtttagctatggttatagcattgaaattatttggtattacaactaccaaaccatccaatttaaaatagtccataagtaaaaagccaagcatgacacaagagggctatgtgatggtattggttcgagaccgtgtggaatgcataatattttatagacgtttttcaatactaatatcttaaacttatttaaattaaacataatttattatcttaataatcatttataaaataaaagatacatatagctaacttaatagcctataaaatccaaagtataatacatcatttgtgtttaccaatatcaaagtaggataaatggaccagttttgagtcgttagacaaaatgatatataatataccatcaacaatagtaattaactctgaaatgcagaatcgcagaaaatagttgataaatcatttgtcattttctaatgtgatttcagttccctatatagtatagttgctatttaacaaatggtgttggaaagttgaaacatttaaactaaaagccaaaataaaataaaatttaagtctcttcttgaacatttaccattaaattttgttttcttctatacactaaagaaaaatctcctaaaatagatacagctttcattgctctttttgtttttaaacggttaaaagaagaaacaaactttaaataaccgttaaattagatattgatcagaaacaaaaaaaccggtttcgaaaacgcgttaccaaaccggatattgcttaaaaagtcccacttcaatttgtttttttcctgcttcttcttctaaaaataaaaactctactcttgtcactctctttttgctgtccctattttcactccactctttttcatttttttagtccctactttatttctcattcattatccttttctaattaaaaaaaattaataccaaatctaaacatcatcattcattttaggagatgtattagaccttacattttgaatgatgagttttagttatatgattttgatgattttaggaaagttgatgtgatttattgtaaaatcttttcaaatttcatctaaaaccatataatttggatttctgtatttttaagtgattttttttttcaaatctttcaatattaataaacatcaaattcataaactgtttccaataacagtgaaatttaaggtatattttttagttcaacaacactagatttcattagaatttttaaaatttataatgaataacataagatttataaatttacacaaatcacttaaaataataaattgaatacgctcctcttaaattattcacaaaattatacgttaccaactatacataaattataaataaattaaaaattaaaagtctataaatagatttaaatttaattgtgtagggtttagttatggagaaaacataattgtgtaagtttttttggcttctatatatattaccacaaatatataacacaatccgctctcaaacccaaacaagcccaccaatctcttcttctctgctcttctctctctgtagacactagaagaagaacaaaaatgctcaaacagtttcttcttctccaatccttctccttcttcctcttcaatgtaaagcatattcttcaatctcttttactattgattattatctagtgaatttttgaatttgcggttactagattttgttgttgttgaatgaatttggattttgttggcaatgtaggtagttatcgtcggaggaagaacattcggcggcggtttctcagcggaggagaatccatttactccaaaagcatctctagttcgttactggaacaaagagattcgtggccaatctcccagatcggagtttttaatctcaaaagcttcaccactcaacgccgtagactcagcaactttctcaaaactcgccgccgcgaactcgctgccgactcgttttcccgatttctgctccgccgcgaatctcttctgttttcctgatttaggagcgagtctcgagaaacacgacgacgacgttaaattctccgtttatgaccagaagaacttcactaactacggcaatgctcgtgccggaggagcagattcgttcaaaaactactcgaaagacggtaatgtcgtaaccgattcgttccggagatacagccgtaacgcggcgggtcacgacgataaattcactgtctacggtgaaaacagtaacgtggtagaggaaggattcaattcatacggaacattcggaaccggcggcgccggagatttcactaactaccaaaacaacgtgaacaatccaacgagtcgattcacggcgtattccgacggaggtaacggtcgatctcaaacattcaaaacctacacacacgaagctaacgccggtaacggtcaatcattcacaagctacggcaaaaacggaaacggagttcctaacgagttcacttcttacggcgtctcctccaatgtaatcggctccggtttctctaactacggcgagagtggaaacgcggcgaacgataccttcacaagctacggaagcgacggtaatgtacctcagaacaattttaataactacggtgcttccggtaacgccgccgtggataccttcgcgaattacagagacaaggccaacgtcggagacgattcgttctcatcctatgcgaaagattcgaattcggagaaggttaatttcgtaaattacggtcaatctttcaatcccggttcagaaactttcaccggttatggcaaaggagctgaaggaagcaaactcagcttcaaaacctatacaccaaactctactttcaaggactacgccaaaaagggcgtcgcttttgctaaatacaacgtttcaacaaccaccgcgaacaccgtcggcgatggcaaaaccgtaaataaatggatcgaaccgggtaaattctttagagaatcgtcgcttaaagaaggtacagtgattcctatgcctgatattaaagataaaatgcctaaaaggtcgtttttaccccggagtataattacgaaactacccttctctacttctaaactcggtgagattaagagaatcttccacgccgttgagaattcgacgatgggaggtataatcaccgacgcagtgacggagtgcgagaggccaccgagcgtcggagagacgaaacggtgcgtaggatcagcggaggatatgatcgatttcgcgacgtcggtgttaggtcgtagcgtggtgcttagaacaacggagaacgtagccgggtcaaaggaaaaggtagtgatcgggaaagtcaacggaatcaacggtgggaaattaacgaaagctgtgtcgtgtcatcagagtttgtacccgtatctattgtattactgccactccgtaccaaaggttcgggtatacgaagctgatcttctagagttgaatagtaagaagaagattaaccacgggattgccatctgtcacatggacacgtcatcatggggtccgagtcatggagctttcttagctctcgggtcaaaaccgggtcggatcgaagtttgtcactggatatttgagaacgacatgaactgggctatcgctgattagaccggtggttatggacttatcaaatagtatgattattactatcttatcgccgagttttaattacatagaggaatgttaattttctattatcattactataatattttgaagttttttcagtaacatgtaaagaatgcttgttactgatttgtggtggtgcaaaataatttttatgaagattttagtgaatgtctgttgagcgttgacgcaatttatgatatctggttggattggtcgatatttatattttatctataaagtgaatgggattatgaaattgaaatggatatatttgtttatataatataaggtgaaaaaaacatataaaagaagatggggatagtgatggtgttttcaattacatgtgctgagttatgtccacagaccacaagatgttgtaggcgtgtagaaagatgaggtggattttatgtgccactcaatttgttttatgaacattttaagatattttatgtgaaaaaaaaaagagatattgagagtcacgagttgtggctatatcaatgggacaaatgcgtaatgaggttaacacacttggcgttgtggctgttgtgaacatttttttatatgaaatttttttctgtgtttgtttttattttgtttgggagttttcgtgagccgacattaacgtataaacttttcatttcttgtcttgtgagactaatttgtttgagtacttggattagtcaattgtgagtctctttctttggcaacttctgatacgcaaagtggttgtgtgtatttacaatttatttgcgtttgcgcgtgtaaaatgcataatgcaactactaatgattttcaaattataattgacattgatttagttatctctttttttttttttttttagaataactgagaagttgtgaattttgtaatctatatataactaactaattcgtttcttttctatcacgttaatttactcgagcaatctttttaatataatatctggttaaacataaggaggtaaccaagatagacatagaatagagtgaacatagaacacccatactcttccaaaagaatgagccaaagataaggacatatgagagttaagacaactcttacaagtgagaggaatttctttcatcctcagttcctcacaaaacctatgaagccaagatagatgacttgatgctacatatgaatgtaactttgaatctattatattgttacactttgagtgatgatagtaactcctctatttgaattaaccctttcaacgtacaattcccaatctcatattttcttctaaccatataaaaaaagtgaatatctatagtctgaaatatattatatttgtttggtaatgttcgagattctatcgtcttactattagaagtgaaatagtatacgcgttaacaagaaagtttcaagtatacgtgtgcggccatcttgcttattgtcaatagctggtttcaaatttgtgtaaactatatgccaaaagtcttcaatttccacatatagaacagtctgtctttaataaacatgaaaccccgcaaaaacaaaacacaccacaaatcttgttagtattgtctctaaaaataaacatgtgtcacaattttgaggaatatgaaatcctatttgcagctaaacctacttcgatttaattatattacttatcagacgtaaatcatctacctaacaaagacaaatcagcatgtgagtcaacttaatttcctcccttattatcgcgcaaataatggggtttttcttaatcatttgtcgaaataacctgctcatataatttacttcaatatctacatatacatttttgcagctattttgtgaaataaatcatgtagttgagacttatttagtcactagattttaatgtttgtttttgttaattagaaaaaaaaattttcgaattaaatatttgacacttaacaatcttccctaaatctctccacattaactacacgattagttactaaaataaaacttccaaaatatttaatatcatttaattactacaaaattatcatttttgatattgtttttttccatgactataacaattcgattataatcatcaaaccggagagatatttgatagcatttaagtactacaaaattacaaaatatttagacaataattcataaacatatcataaataagatcaacattaataaaataaatgagttttttacgggacggattggcgggacgagtttggcaggacgttacttaataacaattgtaaactataaaataaaaatattttaaagataaatacaatttgcaaacttttatatatactaacttaaaaaaataaattgtttccgcggtgtaccgcaagttaaaatctagtatgttcatgtttttgtaattattaaaggtcaatcgaggctttacttttttttttttttttctcttttgtttctgctttcttttaagaagattgaagataaatgttacctaacctaactcatattttaagcataacatatcattctttttttgggatctacaaacgtataattatataattgtgggttcatctagtgcatgaaaatggaagaatccatcactttcaattaccgacttaactattttggcatgttatgtttgttactttttcccccttaaatttaggacgataaaaggattatattttttgttggtagaatttagtatggaaggataaaattaaatttgtttacatctatcacgtggttttcattactgtaaaaaagtgaatacaatccatcatcgtacataacaaacgagaggccagtagggtgtgaaactcataaccagaaacgatgttttgttatggaatcacaaggatcacaataactcttgttttggttaattggatatgtgtgtttataagttcacggttttgtgtcaacgatgctatgacaatgtaacagaggagtaatggagtttgacctctgtgtgtgatcagaaagacccacccatctctgtatatctctccccattgaagctttacctatatctcaactaacttggtccaaatccattattggatagaggaaattactgttttatgacaacaataaatttgtgaattatctatcagagaacctataaaggcatgaagtgttgtgagatcaaatcaacttcaatagagtttctgtgtttgtccttggcagagttttcacttcattcaatttggatccctctactaaatctgttaagtctgtttctggttggttgatacaatcaaagactaaatgccaatttccatgtgaacttcactctgtttcagtaactcaccatttcactatctactactattctagttttctatatacttagttctacaggacaaaacctcctttgcaaaatccgattcaatctcattcttgagtactagaagaagaagaactatactaagtttccaatgctctttacaccatcttaaacctataattgccaatttgcaagatttgaatacaaacaaacattcactccaccggattcaatatggtctctttttatcttcttccacgatttatgacgaaccaatgctccctgaaaaaccttgaaatgccctgcttatgaaggagaactttcccttttgcctccaataagtagcaaacctctccttccagttaaccacatcatgattgccttctgtcacaagatcttggcactcttccaagcacttctgcttccacaggtcattctacgaagccatgtctcgcagttcagaagaaacacaagccaatgtcccaatatccacaccgggaagcgactctagtatcttgtgttttagctctcgaggtagactgataaagcaaggtggaagttctaacccagttttgtagcaaagatcaaccaacagaggcgtaacaataccatcttttatcattctccaccacacgagtaccttacagtcaatgctcaaagtatcttcttcttcatcagatttcaaagtttccataagtaaatcaacaatgtgcacatagctacgtttatcaatagacaccacacgaacaaaactaccaacactaagagatccataaactacaacatcgcctccttctcaaaattcaaaccgactattcctttcacagaaggtagagtatagttaagcgataccaaagtcttcttcgagaagctaaaacgcatagatgaatcaggatcaaacaacacaaatccagattctaacataacagcatgaacagtcatgatcacaatcgtcaattcacaagtgtcaccagattcctccatcaatatatttttcaacaagagaggctcgcttaacctttttacaccggagagattcatgctgccaccggaatctacgaacaatctcctgatgattcgtttccgatttctgatcaaacgcactaaaatcagacgaatcgagagagtaacagccgcgaggatatcaccgtcgttgtaatcaatcgacaaacgaacagaggaaggcgtcgattcattgatctttagccggagatcatggaggctagactcatcggcaaactcgaaagttggggtttcgttcgtctcgaggtttctcaactgataaaagagaaggcatagatgataaccagttattaattcccggttgaaccagttgctaaccggttatcggctcatttttaaatatctatgggccgaattaagctttgtactgggtccttatcgtaaagatccgacccgacccgggtttaaaacctcaccttcgtaaatgacagaaatgtcgccgaagttttttttgagagtttgagaaaagagtaaacatggcggccaacggcgtgagaagagctcttcaggcatcgtcatcctccgggaagatactctttggtcgttcatcagcggcaacttctgcttcgaagatcggaaaatcagccggaattgctttcgggaatggatcatcttcttcaactcgtccctcacttcgtagactcacattctccaggttagctatcgaatcctagaaccgagattctacaggcgatagatctgttttcaatcgagaaatagtttgattttgcgtctacaatgtatgagctttatgctgaagaattagggtttatctctgaaatgtaaatttgggttttgtgtttagggtacctgtggaattgagtgcagggatttcactaataccattacatagtgttactgcttcagctttgctcacttcattgctatctctgagcaatcaaaactggagttgcttatcagaaggtaaattttttacttgtgttcatgatttatgtttagaattgaagttgattctgaatttctgtttccagactaggagtaaatgtagtctcaattggtaaataggattccataaatgatctgccttgacatgctaatagaagtaatcggttttgtatagtatatcaagtgatcggctttatagctaatgatctttttcttcgcatgttttattacgaaaacgtagcagaagggcattgagtttgtataaattgttccttgtcatactattgctccattgtgacgacctatcactgtctatctgacctaatgagagtggaatcttatcgatggtagtaaaatgatgtgttgattcacatttacgaaacattgaaccagtggattagattgttcagacttgtgttgtgttggtctatttgcacagtgactaatctaagtttgcattcgatatttgcaggatttgcttcaacactataacatggcctgcaagttttgatagattccaagaaatttgtttcatttcatcgctgtattttgcagtttgtcctagaagttggagatatcgagaaaaaacacaaacccttgctttcttctaagggctagtttgttctgtttacctaatacaattgtcatattcaattgatgattccgttacctttaacactttgcctggaaataaactactcattatgcttcatggtttccattacctctctgccagtgaatctgacttaaagctatttaatctcgttcattaatgttcatgattgaaattgaatcactattggtgaattatgtttagaaattgaatcagacccttgttttcttctaacatctaaggcctactttgttctttttgtttatacatttatcatcttaaattggtaatctcgttactttagcacttctggcctacaaataaactactcattatgctgaaattgtttgagttcccttaccaaaaccaattaagatactgtttatagtaaagaaaaagtgattgaaacagttctgactttcttgtaattttgtagtcggaatcatgcgatgtttattggttccaccaactatgcactgtcaagtgtcaaccaccaaatacactatactagagacttaaccattagaaattggttcttcaaattggccatataaattataaatccatgaactgactaaaaagactcatcgttgctttttgtgaagtgttaaaccaaatgatcacggatataaattagaataattgcgacacagatctaccagcaatttcgaccgttgcaacaaagccatgattcaaaaagtttgcttttttaatcttaccgttggctcctagcaactgcaaatccttaagatcaacatctccttcttaattcttacccagttattgaattttctgaaactatcgttcttgatcttaaaagctcaacaaaaatggcagctttggcacctggaattcttcaaaagctaatccaaggtatgaaaacaggaattaaaccaactagagagcaccgaagctctatgttacaggtcacagatatcgttcccattgatctcgacgagaagtctctggagccgaaacaagggtttctcatcaaaatctctgattcctctcactcgatctacgtctctctcccttcggatcaagacgacgtcgttctcagcaataagttgcagttgggtcagtttatctacgttgatcggctcgaacctggatcccctgttcctgtcattaaaggggcaaaacccatacctggccggcaccccttgcttgggacgccggagacattggtggttccgaaagaaagaactgatcaagagattgggtcgaagcctagaagaggatcttggggacaaaacgtcgacttttcttcgtctccgtttgttgtgaaaccaatggcgttggagtttgaccattccacgccggcgaagaggtctgtttcagctagatttgcagcgtctccgatcagaagaggtggagtgagatgctcttttggtggaggggttttggggaaattggaaggagagagtccggcgacggcgatgctaaggaagagttgttttgtttcgtcggcttcgaagtttccgagaagtagaagtgtttgtgacagacaggccaaaaagaacaatgcttctctttttagtcccttcaaatcctctctaggtatattttgcttttaacatttctattgatcatttagtgtgtttacaatgatttattcaggacaatgcttgtttcttgatttcagaggctcaagaagatgttgttcccttgtctacctcgaagaagataaaacccgagaaagataccaatttatcaggaaggctcaacatactaagcaaggtgatttgaactccatttgtgttcttcattgaagtttgatgcttggaataatatcatatctttcttgaaagttcaaatagttccttaatcttctttgtgttactttggtgacaggaagcaactcagcttcgggaggtagctcagaaagttgcccttcaggcattgcgagaagctacaatcacggaaattgttgttcgtcataccaagtatataacccgaaactcttctttcctacgcttttttattagtcggatttgagttggaatgtaatgtgttgatgtggttttgttgggacaggacgttcaccaatctgagtaaatcagcaaaagctgattgccctgcggtgtgctttgagaagttcatggagtttcaccagcagatggcacaaaccattggcgaactcacttccattgaagtagctgctactccagatgctgagaacaagtcacagaacataaacgcaagaaccgaaaatcagaaaccaacagaagaagggtcttcttcgatcctgcatgaaatcgcttataattctattgatcaggagaaaaggagatcaaagagacggattgtcctgaagcagcagagcgaagggaagacagtgagatcaaatgatgagaacaagaacccagcttctggcggtataagcaacacgattaggttagcaaaggagatcgaggatgaagctgcaaactggttcatggagttcatcgaaatagctctggagaaaggtatgaagaaatctagaggccctgatgatgcagacgttaagaaggttccgcaatctctgattctcggggttttaaactggattgaagtcgaacagtctgatagcaacaacaacaagagacgcagagtccatccaaaagcatcaaagatcactagaaagctcagaattaaactgaagaatccttgaaccacttacaatgagaaacactgaatacacgttgtagccttttacagcttataagtcttttgtgttcatggtgtagaaagaagaattttcacatattactgaaggaaaaacgaacaattcacacaggatgattcacagattaatgaagctgagtttgtcgaagcttaaagaattcaacaaatacagataacaaagctttggtagaatcaaatgacccagaaccaagcaatgacagatccagaggccaaaccaacaaccaagaacatcacagtgacgattcctgcagtctccgagtgtctcagtggaaccgattttggagccagaatcatcaagacgcttgtcaagtacccgttggtaagtcccaataagcatgtcagtatagttacaggaatctcagtcctgagaaacatcggaccgtgcaagcaaccccagaagagagggtaaaacaagagcctagcaatggaaccaccaacagcgattttctcatcctccagcatgaatacagcagtcagacacttaccaaccaagtcaaacacattgtacgctgcaataagcagaatagggtaccaatctgtaagaagctctgaatgaacatcctcagtaatgtatccaggaaatatcgacaatgtcaccatgtataagagaacaatcccgaaaccatgagatttaactttcgtcacgatatcccagagtgttgtcctccacgctaaaccggttaaagaacctttctcttcgctcttctctctgattagttcttcattcttacgctcctcatggaacttgatcaccggaagcttatgcgctacgttgtagaacacagcacaaatcaccataacaacaatccccacagcaaagtatagattcgcactttttctcaaaccatcaggatcttgaggatacacagctttagtcaaaattctcaatagtgacacaagaacacctacacatccaaaattcccaaaaacctaaattaatctaaccacagcaaccaaatcattctccattattgaggaagatgaaacatttaccggagccagcagttccggcgacaacagcttgcatatacctctccggcatttcaccggcaacaccgataagacctccttgcataagtgcatcacctagaccggataaggcaacggcggcggaagtaacatcgaatccggcgtataatccgacctgtcctttaacataaaccagatccaaaacaggaaccacaagcaaggcgattacgaagagtaaaagaccgagattgattctaaagctagcgaggctcttatgtgcatagaagacaacgataacgaatagacaaacaagagcaacgagcatgtagataacggcgaagatccgatcgacggccgtggaaggatagaggtaagagaagtaatcgacggcggtgatgaatgcgttccatggaagaagaaagccaacgccgagggtgaagtagatgatgtaagcgaagtggtaggaatcagaaggagcttttttggtagatccttcgtgaggattgaggagaagagaagtctccggtccggcttccgagtcagttacgattccggcggatttatcggtggtggtcatttgaatttgtttagtttctctcagttttggggatttttgggaaattcgttgactaatgggagtcattaaaacggtgcggttttgtatgtgtgtggaattacataaacggtgtcgttttgctggccgagcaaataatttggttggggatgcagtagcgtagacgcattagttggagtattttattttactagtttttgatttttggcaatggccctaaaacgtgtatttgataaataatttatatctgttgtagatgcgaatctcataaaatagtagatattattagttgtagtgtcctactgtgcttttgtccaaaaaaaaaaaaagtgttatagtgtgcatcaccattatcaagttgcattgcattatcataacgagttaatgacgcttgtgtcatccaaaacagatatgtatgttctggtagaaacagatatcataaagtgtttgttttccggcttccgcagtacaacaagagttcgaacaagcctcagtcttattcccatcatgtggatagttaccacatgaaataccccacaaattgcatcttttcgagtaccgagttagtcaacggcttaatctgctttcgaaaagaaacaaaacccgtaatttggaactttagcacgagacagctcttaaccttaaccaaatccatataggattccgtgtataatgttatagtctttctaggatatgatccaatcgagagtaaacacaaagttgtgtgtataccgtctggtgaatcttctgatgaatgtcgggttttaacattgagatcagatcagctgaaaatcatggacaacggttaaaaccaattacaaacatcgtcctttgtagaagagttccaggagagcatcaatggttttctatattatggagccacatatcttgatgatgatttggagattacatactaatgagttttaatggcaatactgaaaagtctgatatgataaggttaccaaacaataatccaaactcacccaaatgatttagtaatgatcgattttgatctctactaaagaagtcggaaaacaaatcgaccaaccaccgaatgagaaaatgatagatgtcgggctaaagccaattgaaatcaatcgaacggctttgctagaaaattccggatggcagagtaaagaagactttttctcttaaaagtatgaagagagaagagtgaaaactgagactatggaataactaatgtatgactatgtttactcttattaatgaagttctatcgagtaaaaaagatggtttttttaattaaaccgaccaattgaacaaaattttattaaaccgacattggaacaaaatttatcggaccgtcttagaaatctctctctctcacaccgtctttctctctccctatcaaatcccttctctctaatatgcgatcttcaaaaccctagtttcttcggatcgcttccaaacttgcgattatctccaagatagtcaaatccttcgctctttctccttttctttcttctctcttcttcttcttcttcttctcgttcgtctgcctcaccgatctccatcaatccaaagtattggaccagatcaccctcgtcgatatttttgattcgattccacaagtgattactagttctctcaatcggtgtaatgatcaattctctatcgtgttgaggatttaaaatcagtgcttaatccttctagttttggagctcctaactggattgtttctaaatcatgaagcttcgaaggagaagagcttcggaagtggtgagtgttcctaaaccaagtaattaaaaccttaatcaactgtttgtctttggaatttagagaacatggctcttttagtttccgtttatggttgttgagatgatctttgattggtataatggggtttgagttcttaagccaaaccttgtgaggcttttgtatcttttactggctgtgttaacccttgttatattcatacttgtaccagcctaccaaaatcagtttgttcatcaatagtgttacttctgttccacttgagctaatacaagaaccccttgcaagctttcgctgggaattcgacaaggttcgtgtgtttcggctccttgtttgtgaatcttttatactgtcatattctcgttttgatgaatgtcgggtttttttcttttatttagggtgacttccatcattgggtggacctcttctatcattttgacactttttttgagaagcacgtaaaagtaaggaaggatctgcgtattgaggaagaatttgatgaatctgatccacctttcccaaaggatgctgttcttcaagttctcagagttatcagacttgttttggagaactgcactaacaaacagttttacacttcttatgaggtaaaaatctgtgccctcaagtctttattcatgtttatcagctcttattctttgttgatttctggttgttcggctagatatgttgcttgatatactgagatgtctacctgcataattctcacacttttttcttcataactgcagcagcatctttctctcctacttgcatctactgatgcagatgttgttgaagcctgtctgcagacgttagctgcctttttgaaaaggccaactggaaaatactccataagagatgcttctctgaatctaaaactattttcccttgcacaaggctgggggggaaaagaggaaggccttggcttgacgtcatgtgccacagaacacagttgtgatcagctttttctccagctagggtgtactcttctttttgagttttatgcttctgatgaatcaccaagtgagcttcctggcggtttacaagttattcatgtacctgatgtcagcatgcggtcagagtctgacctggaactcctgaacaaattagtcattgatcacaatgttcctcccagtttaagatttgcgttgctgaccagattgagatttgcaagggcgttctcgtctttggcaacccggcaacagtatacatgcattcgcttatatgctttcattgttttggttcaagcaagtggtgacactgagaatgttgtttctttctttaatggcgaaccggaatttgtaaatgagttagttacgctggtaagctatgaggatactgtgccagcgaaaataaggatactatgcttgcaatccttggttgcactatcgcaggatcgaactcggcagccgactgttttaactgcagtcacctccggcgggcatcgtggtttgctatctggcttaatgcagaaagcaattgattctgttatttgtaatacttccaagtggtctcttgcttttgcagaagccttgttatcccttgttacagtcctggtttcatcatcgtctggatgttcagccatgcgagaagctggtcttattccgaccctagtgcctctcatcaaagatacagatccccagcacttgcatttggtcagtactgctgtgcatatattagaagtcttcatggattacagcaatccagctgctgctttgttcagagatttgggtggcttagatgatactatctttcggttaaaacaggaagtctctcgaactgaagacgatgtgaaagaaattgtttgctgttctggtagtaatgggcctgaagacgatactgaacaacttccctattctgaagcattaatttcgtatcacaggagattgttgttaaaagcgttgttacgtgcaatatcccttggaacttatgctcctggtaacactaacctctacggttccgaggagagcttgttgcctgaatgcttatgcattatcttccggagggcaaaagattttgggggtggagtattctcgcttgctgccactgtcatgagtgatctcattcataaagatcccacttgtttcaatgctttagattcagctggtttaacttctgcctttcttgatgctatatctgatgaggtcatatgctctgcagaagctataacatgcattccgcagtgtctggatgctctgtgtctcaacaatagcggtcttcaagctgtgaaggaccgaaatgccttgaggtgttttgtgaaaatatttagttctccctcttatctgaaggctcttactagtgatacacctggttctctgtcaagtgggcttgatgaactcttgagacatcaatcttcgttgcgcacttatggagttgatatgttcattgaaatccttaattccatcttgattattggatctgggatggaggccaccacctctaagtcagcggatgtgcctactgatgctgctcctgttcctatggaaattgacgttgatgagaagagcttggcagtttcggatgaggcggaaccatcttctgacacttctccagcaaacattgagctatttctgccagattgtgtgtgtaatgttgctcgtctctttgaaacagttcttcagaatgcggaagtatgttccctgtttgttgagaagaaaggaattgatactgttttgcagctattctctttacctcttatgcctctatcaacctctcttggtcaaagtttttctgtcgcttttaagaacttctcccctcagcattcagctggtcttgcccgaatattgtgctcctacttaagagaacatctgaagaagacaaacaaccttttggtttccattgaaggtactcagcttcttaaattagagtctgcggtccagacaaagattttgagatctctttcttgcctagaaggcatgttgtccctctccaactttttgttgaaaggatcagcttcagttatctcagaattgagtgctgctaatgctgatgtactgaaagaacttggtataacatacaagcaaacgatttggcagatggccttgtgtaatgatactaaggaagatgaaaaaaagagtgttgatcgagcatctgataattcagtttcagcatcatccagtactgctgaaagagagagtgatgaggattcaagcaatgctttagcagttagatacacaaaccctgtatccattagaagcagtagctctcagtctatttggggtgggcatcgcgaatttctgtctgttgtgcgttctggcagaggtgttcatggtcatacccgccacgcaatagcccgaatgaggggtgggagaactcgtcggcacctggagtcttttaattttgattctgaaattccagcggatctgccagtaacctcatcttcccatgagctgaaaaagaaaagcaccgaagttcttattgctgaaattttaaacaagctgaattgtacactacgtttttttttcacatcccttgtgaaaggatttacctctgctaatcgtcgcaggattgatgggccatcattgagttcagcatctaagactcttggtactgccctagctaaagtatttcttgaagctcttaacttccaggggtacggtgctgctgctgggcctgatacatctctgtcactgaagtgccggtaccttggaaaagtggtagatgacataactttcctgacatttgatactcgaaggagggtctgttttacagctatggtgaatagtttttatgtccatggaacatttaaggaacttctcaccacctttgaagctacaagccagttgctttggaaagtgccgttttctattcgtgcatctagtactgagaatgagaagtcaggtgagagaaatttatggtctcacagtaagtggctggtagatactcttcaaaactattgccgagcactggactattttgttaactctacgtatcttttatctccaacctctcaaacgcagcttcttgtacagccagcttcagttgatttgtcgattggactttttcctgtaccaagggaacctgagacttttgtgcgaaatctgcagtctcaggttctggaagtcatactacctatatggaaccaccctatgtttccagattgcaatcctaattttgttgcttcagttacctcccttgttacacatatttactctggtgttgtggatactagggaaaatcgaagtggtgctactcagggtacaaaccaaagagccttgcctctacagcctgacgaagccattgttggtatgattgttgaaatgggattttcaaggtcaagggctgaagacgcattacgaagagtgggaacgaacagtgttgagatggctatggactggttgtttaccaatcctgaggatcctgtgcaggaagatgacgaattggctcaagcacttgcactatctcttggaaattcatctgaaactccaaaacttgaggatacagaaaagcctgtagatgttccgcaggaagaagcagaaccaaaagaacctcctgttgatgaagtcattgctgcatcagtgaagttatttcagagtgatgattctattgctttcccgttagtggatttgtttgtgacactatgtaaccgaaacaaaggggaagatcggccaaaaatcgtgttttatcttattcagcaactgaagcttgtacaacttgatttctccaaggatactggtgctttgactatgataccacacattttagcattagtactctcagaagatgataacacacgagaaattgctgcacaggatggtattgtggccgtagcaattggtatcttgacggatttcaaccttaagagtgaatctgaaactgacattctggctccaaaatgcattagtgctttgcttcttgtattgagcatgatgctgcaggcacagacaagactctcgtctgaatatgtggaaggaaatcaaggtggatctttagtgctgagtgattctccgcaagactcaacagcagctttaaaggacgcgttatcttcagatgttgctaaaggggagtcaaaccaggctttggaatcgatgtttgggaaatctacaggctatctgaccatggaagagagttctaaagttttactaatcgcctgtggcctcataaagcagcgtgttccagctatgatcatgcaggctgtgcttcagctatgtgcccgtctaacgaaatcacatgctttagctatccagtttctggaaaatggaggcttatcttcactttttaatcttccgaaaaaatgttttttccctgggtatgatactgttgcatctgttattgtacggcatcttgttgaagatcctcagactctccaaattgctatggaaacagaaatacgtcagaccttgagtgggaagagacatataggtagagtattacctcggacattcctgacgacaatggcacctgtaatttcaagagatccggttgtttttatgaaagctgtggcttcaacttgtcagttggagtcatcaggaggtacggactttgtgatactgacaaaggaaaaagaaaagccgaaagtttctggcagtgaacacgggttttctttaaatgaaccccttggaatatctgaaaataagcttcatgatgggtcaggaaaatgttcaaaaagccacagaagagtccccactaacttcatccaagttattgatcagcttattgacattgtcttgagttttcctgggttgaagaggcaggaaggtgaagcagccaatttaatttcgatggatgttgatgagccaactactaaagtgaagggtaaatcaaaagttggtgagccggagaaagcagaacttgggtctgaaaaatctgaagaattggccagggtaacttttattttgaagttgttgagtgatattgttctcatgtacctacatggtaccagtgtcatactgagacgggatacagaaatatctcaacttcgagggtccaatctacctgatgattcacctggaaatggagggttaatttaccatgtcattcatcgattgcttcctatatctctcgaaaagtttgttggacctgaagaatggaaggagaaactgtctgaaaaggcgtcctggtttctggttgttttgtgcagtcgttccaatgaagggcgtaaaagaataatcaatgagcttacgagggttctatccgtatttgcttccttgggaaggagttcgagtcaaagtgttctattacctgataaaagagttcttgcttttgctaacctggtttattcgatcttgacaaagaattcatcttcaagcaatttccctggttgtggctgttcacctgacgttgcaaagagcatgatagacgggggaactatccagtgtctgaccagcatccttaacgtgattgatcttgaccaccctgatgccccaaagcttgtcactcttattctcaagtctctcgagacactgacgagggctgcaaatgccgctgagcagctaaaatcagaagtaccaaatgagcaaaaaaatacagattctgatgagagacatgatagtcatggaacttcaacttcaactgaagttgatgagctgaatcaaaataatagcagtctacagcaagtaacagatgcagtagataatggacaggagcagcctcaagtttcctctcagagtgaaggtgaaaggggttctagtctaacccaggctatgcttcaggagatgaggatagagggcgatgagacaatactgcctgaacctattcagatggatttctttcgagaagagattgaaggtgatcaaatcgaaatgagttttcatgttgaagatagggctgacgatgatgtagatgatgacatggacgatgaaggagaggatgatgaaggagatgatgaagatgcagattcagtggaagatggagctggtgttatgtctattgctggaactgatgttgaagaccctgaagatactggccttggagatgaatataatgatgacatggttgatgaagatgaggaagatgaggatgaatataatgatgacatggttgatgaagatgaggatgatgaggatgaatataatgatgacatggtggatgaagatgaggatgatttccacgagactcgtgtaatagaagtgcggtggagggaagctcttgatgggctggatcacttccagattgttgggcgatctggtggtggaaatggttttattgacgatattactgctgagccgtttgaaggtgtgaatgtagacgatctgtttgctctgcggagatccttgggcttcgagcgtagacgtcaaacaggcagatcttcttttgatcgatctggctcagaagtacatggttttcagcatccgctcttctccaggccttcacaaactggcaatacagcgtcagtttcagcaagtgctggcagtatatccaggcattcagaagctggcagctacgacgtagcacaattttacatgtttgattcaccggttctaccatttgatcaagtaccagttgatccttttagtgatcgtttaggaggtggtggggcacctcctcctttgactgattattctgttgtgggtatggattcatcaagaagaggggttggtgatagtcggtggactgatgtaggtcaccctcagcctagtagcctatctgcttcaattgcccagttgatagaagaacattttattaccaacttgcgtgcttctgctccagtagatactgttgttgaaagggagactaataccacagaagtccaagagcagcagcagccggatgttcctccatctgttggaagcgaaactgttttgggtgatggtaacgaaggtggtgaacaaagtgaagaacatgaactgttaaataacaatgaagttatgcaccctcttcctttgaacagtacaccgaatgagattgatagaatggaagttggggaagggggtggagcacctattgagcaagtagaccgtgaagcagtgcatcttatctccagtgctcagggtcaatctgatacttccggtattcaaaatgtgtctgttaccgctatccctcctccagtagatgatcctgattctaattttcaaccaagtgttgatgtagatatgagtagtgatggtgcagagggaaatcaaagtgtacaaccttcacctttggacggtgacaacaatgagctctcatccatggaagctacacaagatgtgaggaatgatgaacaagttgatgaaggtagcttggatggtagggcacctgaagtgaatgccatcgatcctacatttttggaagcgctccctgaagatttgcgggcagaagtccttgcttctcagcaagctcagtccgtccagcctccaacttatgaaccaccttcagtagacgacatagatcctgaatttttggctgcgcttcccccagagatccaaagagaggttcttgctcaacaaagagcacaaaggatgttacagcagtcacaaggacagccagttgacatggataatgcttcgattattgctactctacctgctgatttacgagaagaggtttgtatctctttatttgaattaggtaatttgaattttgaaatgtttataacaatctgaaatatgctgtttccaggttctcttaacttcttcagaagcagttttggcagctttgcctccacctttacttgcggaagcgcagatgctcagagaccgagcaatgaggcactatcaagctcgtagtagagtttttggaagtagccacaggctaaataatcggaggaatggtttgggttataggctgacagggatggagaggggtgttggagtcactattggtcagagggatgtttcgtcttctgcagatggcttgaaagtaaaagagattgaaggagaccctcttgtgaatgctgatgccttgaaatcactaatcaggctattacgactagcacaggttagagtaattctgtttttacgctacccccttctagcaactaaacaaatcaatgatttttgttcttatctattgacttttctaattgaagtatcataagtactttcttatacttctgttggttctaacaatgatgttattttaatgtaccagccgttgggaaaaggccttctgcagaggcttcttttaaatctatgtgctcacagttttacaagagcaaatctggttcaacttttactggatatgattaggccagagatggaaacattaccgagcgagttggctttaactaatccgcaaagactctatggctgtcaattaaatgttgtttatggtcgatcccagctgttgaatggtagtaataactaccgaaagtctttgtttgctattctcgcaagcgtccagagcactgactgactttctttgctcttaacacaggtcttcctcctttagtgttccgtcgggtgcttgaggttttgacgtacttggctacaaatcattcggctgttgctgacatgttgttttattttgattcgtcacttctatcccagttgtcaagccgaaaaggtaaagagaaagttactcatgagacagattcccgggatctggagatacctctggttgtcttccttaaactgcttaatcggcctcagcttttgcagagtacatctcatctagcgctggtatgtttagcttgattttcagaataatagaaattttctcacggcaacgtcctgaatgttgctttggttgttatcttatctgtattgttttaggtcatgggcttgctgcaagtagttgtctacacagcagcgtcccgaattgagggttggtctccgtcatcaggagtgcctgagaaactagaaaacaaacctgtcggtgaagaagcttcaagtgaaacacaaaaagatgctgaatctgagctatctgttgcaagaagaaagaattgtgctgaattatataacatattcttgcagttaccacagtcggacctctgcaatctttgcatgcttcttggatatgaagggtgagggacacctttctttctttctttctttctttgcgttcctaagactttctttttatatgtagtagtctacacaacatagatcttttcttttccttggtctcaattatttccttgaattgcttaagacgaactcacatgttttattaccgtaataggttatcggataaaatttactcgttagcgggagaggtactgaaaaagttggctgccgtagatgttactcatcgcaagttttttacaaaagaactctcagagttggcgagtggtttgagttcctcaactgtccgtgtgctggcaacactaagcactacacagaagatgagtcagaatacatgttccatggcaggtgcttcaattctccgtgttctgcaagtgcttagctccctaacttccactattgatgatagcaatgtgggaaccgacaaagaaacagatcaggaggaacaaaacattatgcagggactaaaggtggcattagagcccttgtggcaggaacttggccagtgtatcagcatgactgagttgcagctcgatcatactgcagctacatcaaatgtcaatcctggagatcatgttctagggatctctcctacgtcatctctctctccaggaactcagagtctcctgcctcttattgaggctttctttgttctctgtgagaagattcaaactccgtcaatgttacagcaggatgcaactgtgacagcgggagaagtaaaggagtcgtctactcatggttcttcatcgaaaaccattgtagattctcagaagaaaattgatggttctgttacattttcaaagtttgtggagaagcacaggcggcttttaaattcatttgttaggcaaaatccaagtttgctggagaagtctttttcaatgatgctcaaggcaccaaggctgattgattttgacaacaagaaagcgtacttcaggtcaagaataaggcaccaacatgatcaacatatttctgggccattacgtattagtgtccgccgagcttatgtgttggaagattcatacaaccagttacgtatgcgctccccacaggatctgaagggacgtctgaatgtgcagtttcaaggtgaggaaggtattgatgctggtggcctgacccgagaatggtatcagttattgtcaagagttatatttgacaaaggagcgttgctcttcactaccgttggaaatgatgccaccttccaaccgaatcccaattctgtttaccaaactgagcatctatcatacttcaaatttgttggtcgcatggtaatatatcaggaccttgtcaatgcaatgatctgattgatcgttttttgctctctctgatgtgtttgtgatgtcactgcaggtggcaaaggcgttgtttgatgggcagcttttggatgtctatttcacccgttctttctataaacacatacttggtgtgaaggtgacttatcatgacattgaggcggtggatcctgattactacaagaatttgaagtggctattagaggtttgaggacctagcctttatttacctttatctattacatagctcaaaaatagaagtcaggtcctgtgctgtttgagccttatatatttgtccccttttctgtttattcagaatgatgtgagcgacatactcgacctcacatttagtatggacgcagatgaggaaaaacacattctttacgagaagactgaggtgtgtggtgattgatgttctttcttttgttgtgctttatcccaaattgcctagtatattgaattgatcattttatctttgatgaaaaggtgacggactatgaacttaaacctggaggacgaaacatacgggtaacagaagaaacaaaacatgaatatgttgaccttgtggccgaccacatacttaccagtgctatacgccctcaaatcaacgctttcctagaaggcttaaatgagttgatacctcgtgagcttgtatcaattttcaatgataaagagcttgagctcctaatcagcgggttgcctgagattgattgtaagttggcattctatttttcaatatttttgcatctatttgcttattcatttaaagttataataacaatcttgttatctgttttcttttgttttttagttgatgatctaaaagcaaataccgagtataccagctacacggtagggtcccctgttattcgttggttctgggaggttgtcaaagctttcagcaaagaagatatggctagatttcttcaatttgtcactggaacatcaaaggtaaaaccaatatttgcagcttctgtccaagtcgcttgagcttcattttctgatatgtactagtttttcttctggttgttttacaagcggtgtttctgttttcaggttcccttggaaggcttcaaggcactgcaaggtatttctggccctcaaagattacaaatccacaaagcatatggatctccggagcggctgccatcagctcatacatggttagacattattacaaagtcttttttttttcagttaaacgtggtcgtaattttcattggttctgttgcagttttaaccaactagacctccctgagtatcaatctaaggaacaagttcaggaacgcctgcttcttgcaattcacgaagccaatgaaggttttgggtttgcttgaacaaagcttaagaagaaggaagagcttttgattaagagcaagaaatagaaaacgcaagtggctatttttgtctgtccatatattatgttagtatattagtccattgttttttttttaggctttctctctatttccttagattttgttaaaaatagttgcaaactctcaaatattagtagttgatatttgctatccatttttataagatgagaaaattacataactgctggtcattattttgaatacttcctttctgtcacgcgtattggcatattcctcaaccaacatacgaaggccagtttgttatcacaagtttgcaagcccattgtcttaatatctcaactgtctccagaagcaagtctcataacatctagaagaggttgttgagcataccaagtgtgttccgaggaggataaacatgggagactccactccaaactccattaccttcaccacctgcctattcagcaaatgaagaatcagagtgtgtgcatggcatctctccgaaaatcccacacagggtcttgatctttgtcctccacgttcatcatcattttcatccattattgcttactcgccttgtccttgacgttccacatttgtctccagccaacaagtattgctggtataagctttgatagtttgtaaaataaacattagctaacataaatactcttttgcctcttatcaaaaaaaaaaaatgatgcttcacaagttaacacaccttcaaattttcttaaaaaacatctatatgcaataacagaattcaaattataatgcaataatgataagaaaacatttctcctccatcaaccaaaacgtgaattaacatctatcgaaaataggtgcttcacaagttgacacacttgacacacaaaatctacaagtgtgagagcgcttgttcataacgagtttaaagaatcgcaaaacacactcatattaataataatcaatcaacttttggaaatattcaatactcttttgttgatacatgtagtcttctaagataaaataaaaacgtatacactaaacagttttttttttttttttttggggtcaataacagaatctaaaaattaaagttaaaatttaaacgataaaagtatttaattgggacgtttatcaaaatgaaacaatgcattggatcggctttaaaaagcaaccaaaaaaaaaagagctgtcatgattgatattcatcatcacaaaataatgaaaattgccttattcacgtaataacaaaaagaaaatgattttataacagtcgaatcgtacggcagatatttgttggcccctcctcttatatgatatcatagtcaacaagagaacaaagccacagagagagagagacactaaaaccctaatctcttactcactgtctctcttcttcaatccatgtcttcaacacaagaagcgtctgttactgatttgcccgtgaagagacctagagaagcagaggaggacaataacggcggcgccatggaaacagagaacggtggaggagagataaaggagccttcttgtatgtcctctattattcctggatggttctctgagattagtcctatgtggccaggtatagattcctctgttttccccaattgaggtccgtctaattcctcatgttaattctctgtgaagctgattttgaatatctctatctgagtttgtaggagaagcacattctctcaaggtagagaagattctattccaagggaaatcagattaccaggatgttattgttttccaggtaataaggacagtttcttggttagtctgtctctctaagtttggttcacttttatataaagttgtcaactttggtgtattttgttagtctgcaacatatggaaaggttttggttttggatggagtgattcaactcactgagagagatgaatgtgcgtatcaagaaatgatcactcatcttcctttgtgctctatctccaaccccaaaaaggtaaatcctttatcaacaatcttaatctctagataatcaaagtctcttgctttcaaatggaaaactgcaagaaagaaggtgaattgtctatcagttatgaccatataacttgtttgagctagaaatacatcaaaaggatgatcctttaagggagttttagttttgagtttgtgtttgagaaaggtctataattgaagtgttttgagtcttttccctcttgctattggatggtataactgtaaagtaaccaagtgggtttcttatggaaatgtttcttcttcaggtactggtgattggaggaggagatggaggagtcctgagggaagtggcacgtcatagttctgttgagcagattgacatttgtgaaatagataaaatggtggttgatgtgagtacttgtcagatttctttcatttattattatgcatcttgcaagtgcattgtgatgaacctttacttaagtttaatatgttttcttccaccttatgggatctttcttcaggtggctaagcagtatttccctaatgtagcagttggatacgaggatcctcgtgtcaacctcatcattggcgatggtacacaatgctctctgctttcatctctctcttttgagatcagtttttataaacaatgttgtggccatttttttgtaggtgttgctttcttgaagaacgctgctgaaggaacctatgatgcagttattgttgattcatctgatccaatcggtccagcaaaagagctatttgagaaacctttctttgagtcagtgaatagagctcttcgtcctggtggagttgtgtgcacacaagctgaaagcttgtggcttcacatggatatcattgaagacattgtttctaattgccgtgacatctttaaaggatctgttaactacgcttggaccagtgttccaacttacccgaggtctttgaaattgatcttgaaaacatttatgctttttttgtttgcattgatctcaaacgtctgagtttgtatgtgattcatttgcagtggagtcattggattcatgctttgttcatctgaaggaccacaagtcgatttcaagaagccagtgagtctaatcgatactgatgaaagctctatcaaatcacactgtcccttgaagtattacaacgctgaggtacataaaaagtagttagtgtaacaatcattttcgaaatgtgtgaatcattgttaagaattgtgattgaatctttttgtgttgcagattcactcagctgctttctgcttgccctcttttgctaagaaggtgattgattcgaaagccaactagaaaagagaagagaaatcatttgctttagagaaacttcatgtggaagtgataatatgatgatacaatgatcctttggaaaaaaataaagaagttttaatttttagaatgtaatgttctttcacctgcaatgttatgtgactgcactgagctatcaatctctttttataagcattacacatatttcatatcctttttttaacgttatgcatctataattgactaactttcgatttaatgtgatcacataatatgatttaaaacccaaaaatttgtagactaattttttatcattttgacatgtttcctctaaattataaaaataagggcaaataaaacaaatattttaataggtgtgatttggaccaaaaatagaaaaaatggagaggcaaaactgttttatgggccttaataaaaattaaatgttttgggcttacatcatcagccgtccaaaacagttggtttgtccaacagaacttgtatacgtgttcactggtattgtcgacgttgacgttataattataacaagaggttgaccatcgttattcacgtgtgtatgggttcacatctatcatgacatcacaatattacaaacattacctaatttatgacttttaaatctaatgataattttacttgatcgtcatcaattatgtttaattttctgtcgctctcaattcctaataataccacttaataggtccttcttgaagtagttggattgccacttgcaactttaaccagcatataaccttgtacatgttccttttttttagttaaagaccttgtacatgttcttaagacgaagaaaaaactaactatagtatatgatttgttaggttacatttatattatatgtagaaaagaaagtagcaaaagataccgatgagtagtgcttatgtacagtagatggttgattcatgcccatttaattttaaaatagttaaaccaattttatgatttaaattgtatatattttaaactaaactgaaatatttatgctatagtatcaaagactttgaactattacgtataacgtatgtgttgattttatagcatattatatgttgagaagatagtttatcatatatattttataatatttgaaacaattggttaatagattttttttatttttttttaaaacaaaataaaaaataaaaccaattttacctttcaaataaaatggagaagatgtcttgttgacatgatgctaatgactaatgagtattgatccgaaatattgttcttggatgtaattacatcataagatttgtcggcttcgaggattgcaatattatattatttgaagcattattattagatgtgtgatcatttttgtggctttaaatgcttcccacgtcttctaaaatgaaaattcaaaggaatgttgataaaatgttttagccttttagggtctaatgactcgtgctagcattaagtattcaaaaaaaaacaaaaaaaaaggaaataattctggttatcgcagaatagtaactagtaaaacgtataaaaattaataaagacaaaactaagttgaaaaagatagagttccacaacaaacaatgacgccatcggtagctaagtaaagtcaatatctaactaattaaatagcaaaatagtagtagatgttaacgtaatcacattcgtaatattctgtaatgacgcaaactcggggatgcagcgacaaaagaaccattacctaacaaaagtaggaaactctcttgtaatttgaacaatcttccaatagtttgtccattatatttgttttttttttgtactattttattcaagaatcgaacatatttctaatttttctacatggaccaggtctcaacattatgaatcacatccgatattacgaaaaactctattaaaatgattactaactctatttttaactatttttcaaccatatagattatttacaaattcatacatatggaccgttttggtgtcttcagatacgacctatgaggagataagaaagaatcgaatcattgacaattattgtttgtgattctgcagaaactgaagagcacttcacgttctttgcacacgtgtatgtccaatatcgcacgccatattaaccgcggttccagttgcatcagaatgtgtccagagatgaaccacgtggaaaccggtttgtggaaaaccggaatcgtcataaacgcttatcggtttctgtcatgatcgtaataatcatgcacgcgtggatcaatcatctctcttagtaagttttgatgatattttgtagacgtttttctttacttttgatgaaactctctagaaaactttaaattatccacgaatatgtggagctctatgtagacgcataattgtgccgcatataaatgccgtcagcttaattttggcagttttcgttacacgaaaatggaacaaatgtaaatgatcaaataagagaggacccataacatcatatatgtgtcggcctttcgatcaccctctccacataaaacctcaaatggccatatttttttcatttatatatttcttaaatggagtaatacccattacccaaaaaagtggtcaccaagaggaattattctgttatagattccaccatcgaagctaaaagcaaatagatatattattgataaaataaaataaggatggctgctagaaatagaaacgcatgggtgttttggataatcctataatatatgtttggtaaatataatattacattttcgataacttattgtattaagttcatatttaaaaccaactcgtgctaagaaacgaataaatgccgtggagcataaatattagtaacttggtatattaaataagtgagacttacatttgtttttaaaatttggtcaagggtttacatttctcatttaaagaaatgtcataagataaactaaacaaaaattatagttgttgagattaggtagcttgaatgttaactcaaaagtttcatgctttttcattcgctcaattgcttttgttttgaatggagcaatcagaagaaaataagtttaattgttaaaacaagtcgccaacaatttttgaaccattgaaaacataaaccaatatttgaagcatttaagaaagattttttttttgaatcatggatgttgaaaactttgacttcgatcaaaggacaaaattttcaattttcaatctttatgatatcgtaaatcactttatttttgaaaagtgaatcaaaaaacatttgtcgaactctaatagcttgaactcaaaatttttcagtaatcataaaatctccagattttactgcattttttatttttacattcgaattaccttgtttaaatatgtagattatgtactttcgcttttgttttccttaaccatattgttttccttttaaaacatagatgccaaatattaagtttattttagtatcactttaaaccacatatcttaaacaatttagttacattaaattcaaacaatataatgcaagtaaatgaataaagatggggatataaaaaaaggtaaagaaaaacaaaggtaaagattgctttgactaaatatagccaaataggcaaatataattacagtccttcatcttttctctagctttagaatttgtcttcaaatatgaacataattagtatagtattttgataatcactttatagaaagcttgaattatatgaatcaacatcccacttatcaaaagccacacttttcatttcctttttcactctcactttgacattttaactttcctcataattacaaaaaaatattgtattaaatagtaattactaaaattaagaaaattcttagcatctgaagatttagttgactaatctcagacctaatctgtttcagtaaactctatatatgtaaattaaattatatctctgattataaattaaaaacaaaaaaacaaaaaacgtctctttgtatctcctcaaaagccgaaacaaaacctctctttctcacaagtaagcaacttcaaaatctggttaacccaaattacaaaaaaaacaaaaaaataaaaagtcgctctctttcttcttaaaaatctcaactttgtcgtccaaaactccaaatccagaaacccatacgcaaatatccttctacgtgtttgctcctttcacgtttttctcgaatcttctcgcatttaccaatcaaacagattctaaagttccaaactttttctttctttctcaaaccattctctgtttctcaactcttcactttccagtggtaagatttgaatcatgggtttctcaaattcttaacttttcacaaaagcccaccatggaaatcgaatcaggaagttatcaaaacgccaaggtaagtcatcatcagatttgatcacaaagttcttacctttacgaaaactctcttctctttcctcgtaatcatcgatatctgattttgttgattgcagaaggaatcatggagaacagtattaacattagcgtatcaaagcttaggtgttgtatacggagacttgagtatttcacctctatatgtatacaaaagcacattcgctgaagacattcatcactctgaatccaacgaagagatctttggtgttttgtctttcatcttttggacaatcactcttgtccctcttcttaaatacgttttcatagttcttagagcagatgataatggtgaaggaggcacttttgctctttactcgcttttatgtcgacacgcacgagtcaactcgttaccgagttgtcaattggctgatgagcagcttattgagtataagactgattcaattggttcgtcttcgatgcctcaatctggttttgcagcgagtttgaaatctactcttgagaaacatggagttttgcagaagattttgcttgttcttgctttgattgggacttgtatggttattggtgatggtgttctcacgcctgctatttcaggtttagtcaacaaaaatatctttgacttttctctttgtttcatgtcaaagacaagatcattgatttgttttacttatcactgttcatttcttttgtctattacagttttttctgcagtatctggtgttgagctttcaatgtctaaggagcatcacaagtgtgagttttttctcactattcttgattagtttcctaggcctagttcatggtgattgtggtcatagattgagtctagttttctcacaagcttgggtcctagaatcatcctgaagtcgtcgggttttttttcttaactgtggagcccgttgttcccaccatctgtttatttgattgcttgatagagtttgcacgtaacacgaattaaatatcgtggcgccatcacgatatcaggattatctatatcgctttcggttccttaatttgatggcccacgttattgaataggtgtttggagtcttctctagacatcaagtggatatctataccaaaactagtagttcattattggatctttgtgtaacattttactttattattgagtttcaatctgcaactgtcatgttcaacaagtctcgtagatgttaaagttttgaccttttgcctcataataaggttattgtgattgtgtctgaaacttttttctttggctttttgttttgtttatgcagatatagaactccctgctgcttgtgtaattctgataggtttgtttgcacttcagcactacggtacacacagggtcgggttcttgttcgccccggtgattctgttgtggctaatgtgtatcagcgccatcggtgtttacaacattttccattggaacccgcatgtgtaccaagcactttctccttattacatgtacaagttcctcaagaaaactcaaagtagaggctggatgtctcttggtggtatcttactctgcattacaggttccgaagcaatgtttgcggatctaggacatttttctcaactctcaatcaaggtcttatagacttcttctcttctctatttcttcttaacatttgttctccattttccttcttaacattctctattgtcctcttgttacagattgcttttacgtcacttgtttacccgtccttgatactcgcctacatgggacaagcagcttatctctctcagcatcatattattgaaagcgaatacaatatcgggttttatgtatcggtaccagaaagattaagatggccagttcttgtgatcgctatactcgctgctgtagttggaagtcaagcaatcatcacaggaacattctcgatcatcaaacaatgctctgcattgggatgcttccctaaagtgaagattgttcatacgtcatccaaaatccacggtcagatttacatccctgagatcaattggatcttgatggttctctgtttagctgtcaccattggcttcagagacaccaagcggttgggtaatgcttcaggtatttataactgaaatcatttcattttagtttggttactacttcaggtaccgttgctaactaactaaccgttgataatgtttttttaataggattggcggttataactgttatgctggtgacaacatgcttaatgtcactagtgattgtactttgctggcacaagagtgtcatctttgcaatcgtattcgttgtattcttcggcacaatcgaatctctctacttctctgcttccttaatcaaattcctcgaaggcgcatgggttccaatcgccctcgctttttgcttccttctcgcgatgtgtacttggcactacggaacactcaagcgctatgagtacgatgtgcaaaacaaagtctcggtcaactggctcctcagtcttagtcaaaccctcgggatcgcacgtgtccgtggccttggactcatccacaccgagctcgtctctggtgtccccgcgatattctctcattttgtcaccaacctccctgccttccaccaggttctcgtcttcctctgtgtcaaatctgttccggttccgcatgttcgtcctcaggaacggtttctagtaggacgcatcgggccaaaagagttccgcatataccgttgcattgtccggttcgggtaccgtgatgtccacaaagacgatttcgagtttgaaggcgatcttgtatgtagcattgccgagtttatccgtactgaagctgaaaccgccgccaccgctgcagagaccaacggagaggatgatgatagaatgtcagtagtaggtacttgttccacatacatgcaaggaattgaggatcactacgaaagcgatattgatgaccctgataaaccagggacgtcagagattcgatcaccaaaaccaaagaaaaagagtaagagtaaggtcaaaaagagagtgaggtttgttgtcccggagactccaaagatagaaaaggaaactaggcaagagttaatggagctaacagaggcacgagagggaggcgtggcttatataatgggaaacgcttatatgaaagcgaagccaggatcaggattactcaagagactcgccattaacattggctacgagtttcttaggaggaacactagaggtcctagaaacatgcttacctcgcctcacgcttctactttagaagtcggtatgatctataatgtctaaaggggggtattttggtctttttgtaaatgcttttgttgtggtttaatttgccaaaaaaaaaaaaatgaattagatatagctaaagaaattttgttctgtggaggttttgctaaaggttgttagagtttatagctcaagaatcctcccttagagccaaatatagagttcaaacttgtgtacaaatgatatatgtgaatcatgtttacaatatgtttgtgattacattgtcccattttaaagcaaaaaatagtccatgaggttgtatggagcatggtgggctactaatgggccatcaaaacaaaatttcgaaaaagttaaaaccggttaagctaatcagatttagccagaccggaccaaatccgaagatgaaaatccattcgtcgagctgtcaatgttggactggtattaatttgtctgaaagcgatctgactttggataatattactcaaataacagctcaaatgttttaaaactgaaaccacgtgcttctctaaattttagttatcctttctctttcgtttatattattaatttttctgactcaaattcagtcttgctttttttttataaatgaaactatttaagcaatctcattgtatgagtttttgtatgatttatctaataagtagtatattcttttttatgtgtccctagttatcttctttacgtcatgaattttcttgtcgtgtatgaaatattataatttgcagacattgtgttcgaaacgtaaactcagaagtcttatacaagaatatacagttttgataatttacttattacttgtggttgtgacttgtgatacctaacaattattatcgaaaaagttcttgaaacaaaatatttgtctgtataaatatcctatcaatttcgttaatttaaaattttcaatttaagtattcagacttaacaacttatacaaatgtagtctggttggtataagccttgttatgtatgtacgattgatgtcgtagtcaatgtagttgataccgtacaattcgatctaagctaatatttttgtcgtccgacttaaaactatataagcatcaatgttttggtgattacgaattagcaaaaacacaattttcaagaaggaaaaaaaaaatatttcacagtaatacattagacactcaatgacagctaactgtaaacaaaaatacaaaacacaaaacagtgtaatacaaaagaatttttatgtataaaatatgtcggttattaaatatccaaaaatgaaaatgtacttggatgttacagctatgagacaactactaagataaagaagaaaaaaaaaagggaagcttcgaaggtgggctttggctttgatacagacgtgcacagatcctttcccatgtaaaaactttgataattctgacgtgtaatttttccattggtaaaacatgttttgactttttacttacgtaagtggaaacgcattttgcaaaaaaatatcatatccctcgaaacacttatccattcacagaaacattctgatcctcgtttttagttaattcgtgtcgaactctcattggttcatatttacgagtccccacacctttagccgacgttggtgtctgtctggataaagaaagaataaataaaacgtttattttctataaaaatgttttgtttactattttcacaattttacgaaaataagagaaaatggaatttttttttttcgtgtggcggaaagtattgtagtattattttttctcttttgggggaatattatcaaagattcaagaatgtatttatttatggaaataaagaaggtgtttgctttttttgtgtgttcttttaaaatctttatataaaagaaaggtatctattgtttggttggtataaatacgcatgcgcattggctttttcgagtagaggaagagactagatagagtcgtgattttttttttcttttttaaattatcaaatggacgtgaaattatttattgaaaaataaacaaaaaaaaaaaaaaaagaagaagaaagagtctatcggatacgtcggatccaatctcccaatccgcattggctgtcgagacaacgtggatgtaaaataaggctttaagttcaagatcatttacctcaaagccactgagcctttaggttaataacgtcctaaattggctaatgtcttcttatgacatactcaaaatctatttttcttggtcgtcaaaattcaatactaatgatgtatatagatgcatggttcattcacaatatagtgtacttggttttttatgcctttccagtttcctataagtatgtatctatatagtatttgattttctaatccttcatataatcttaataaataatattgagttcaaacataagatatttctttatatatggatagagtctctagttgatcgtgtgtaggtgtttcatctttgaccagtggataacgatcagattatttaatttgaaacgttgtttccactttgtagagcttagactctatgtcactatgaaacgacttgtcaacaaagcattttgagccaaataatttaacatataacttggttaaaagacgagtttacgattattactattcttaaagttaaattatgtaatattttcagatttagttttcagtagtcacatgcttaagaacattaacatcagaatacaaccataatgattaatgagagatgtatgcaaaatatatcaactaatcatgttaaaaagggttgtaccattaattagtgatgcttatctgcttcattaagataataattaattttcaggaaaataaaactattgatttgaaattcttttacaaaatatcgatgaaattaaatcggcaataataaccaaaaatatacttttaattataaatgtgaaaaagggggacctcattatatccataaaaaccccagacaaataggtaagatacaagttgctaaatttaattaaaatcccaacaacaacaacaagattatctttaaaatacaatccatcctaaaccaaaaacaaaatttggtccaccatataaaaaaaaacatcatatgctaatatatagtttccatctaccaaactcaaaataaaagataagaagataagaagataaaaggacattaacgtaattttaatcacagcgtcccaagaaactaatccaaaacattatcgcgataaaaccgtacagagcaaaaagctactaataatattattattgaaataaaaatagatagaaaaaatagatcgttagaaaacgtgtatatatatatatatctgtgtattttgcaatatatcgtttttttttcttcgttatcgcattaatctctctctctgtatcttctcttgagtggagcgaatatccaaaagagttccgagtttctttcatccttcacgagcttatactttttcttctccattcgtttgtttttaacgatcaaaaacaacggcgaaggttagtctccggcggtttcttcgttgagatgtgacgacttttttttttgaacgtttataaagattacatattcatgtatttagatttcttttgttatgttaactgtttcattgatgttcgagttaattttaatttgactcaaacacggtaatttttttttaatcttgatctgttttgttacgtaatttttgggttgattttagcctgaaatgatgattttttttctttctagcttatgtttttcgtgaatcaatctttttcaatataaagattagtattttgttgaaattcattttttatttgattggctatgaggaatcagtttcttgaaatggaaatggtgatttgatttgatatgttcacaatatgaatgaagaagattagggttaatttatatatatgaaacaagaaagtttgtttatttaaggtaattgatatatttgttttgttgttattgccatttttaaggtattggaaataagacagaagctgttagctctgtttctccatggtgtcaagatcttgtgctaattttctagacttatcatcttgggaccttttagattttcctcaaactccacgaactcttccacgcgtcatgactgttccgggaatcatcaccgacgtagacggtgatacaacctccgaagtaacttctacctccggtggttcacgtgagaggaagatcattgtagctaacatgttaccactccaatctaaaagagatgcagaaactggtaaatggtgttttaactgggacgaagactctctccagttacaacttagagatgggttctcttcagaaacagagtttctctacgttggatcacttaacgtagacatcgaaactaacgaacaagaagaagtttcacagaagcttttagaggaatttaactgcgttgcaacgtttttgtctcaagagttgcaagaaatgttctatcttggtttctgtaaacatcagttatggccactctttcattacatgcttccaatgtttcctgatcatggtgatcgttttgatcgacgtctatggcaagcttatgtatcagccaacaagatattttcagatagagttatggaagttatcaaccctgaggatgattacgtttggattcaagattatcatcttatggttcttcctactttcttgaggaaacgttttaataggatcaaactcggtttcttccttcatagtccgtttccttcttcagagatttaccgcacattgcctgttcgtgacgagattttgagaggtttgttgaattgtgatctcattggtttccatacgtttgattacgcgaggcatttcttgtcttgttgtagtagaatgcttggtcttgattacgagtctaagcgcggtcacataggtcttgattactttggtaggactgtgtatatcaaaatacttcctgttggtgttcatatgggtagattggagtctgttttgagtcttgattctactgcggcgaagacgaaagagattcaagaacagtttaaagggaagaagcttgttcttggtatcgatgatatggatatatttaaagggataagcttaaagcttatagcaatggaacatctctttgagacttattggcatttgaaagggaaagttgttcttgttcagatagtgaaccctgcaagatcttctggtaaagatgttgaagaagcgaagagggagacgtatgagactgcgaggaggatcaatgagcgttacggtacttctgactataagccgatagttttgatcgatcgtcttgttccacgttctgagaaaaccgcgtattatgctgcagcagattgttgcttagtgaatgcagtgagagatggtatgaacttagttccttataagtatatcgtctgcaggcaggggactcgaagtaataaggccgttgtggattcatcgcctcgcacaagcactcttgtcgtgtctgagtttattggatgctcaccttctttgagtggtgccattagggtgaatccatgggatgtggatgctgttgctgaagcggtaaactcggctcttaaaatgagtgagactgagaagcaactacggcatgagaaacattatcattatattagcactcatgatgttggttattgggcaaagagctttatgcaggatcttgagagagcgtgccgagatcattatagtaaacgttgttgggggattggttttggtttggggttcagagttttgtcactctctccaagttttaggaagctatctgtggaacacattgttccagtttatagaaaaacacagagaagagctatatttcttgattatgatggtactcttgttcctgaaagctccattgttcaagatccaagcaacgaggttgtctctgttctgaaagctctctgtgaagatccgaataacacggtgtttattgttagtggaagaggtagagagtctctgagcaattggctatctccttgtgaaaatcttggaatagcagctgaacatggatacttcattaggtatgtattataaatgcagtcttgttctgactaaacttgagaatacttttttatattttgttttgtgtgtgttagatggaagagcaaagatgagtgggagacttgttattcgcctacggatacagagtggaggtcaatggtggaaccggttatgagatcgtatatggaggcaacagatgggacgagtatagagtttaaagaaagtgctttggtgtggcaccatcaagacgcagatcctgactttggatcatgtcaagctaaggagatgcttgatcatctagagagtgttctcgccaatgagcctgtggttgtcaagagaggtcaacacatcgttgaagtcaaaccacaagtaagtataaaaacagagaatctctttcccttccatccgcacattcgatagttagaacggatcaaagttcactcattgccaagttttgagttggaaaaccatgaaacaaagaatatgttttgacttgactcattgtaatgtatttagggtgtaagcaaaggtctagctgcggagaaagtaatccgagaaatggtagaacgcggggagccaccggaaatggtgatgtgcataggagacgatagatcagacgaagacatgtttgagagcatattaagcacagtgacaaatccggaacttcttgtgcagccagaggtttttgcatgcacggttggaagaaaaccaagcaaagctaaatacttcttggacgatgaagccgacgtgcttaagctcctaagaggtcttggagactcatcatcgagcttaaaacctagttcttctcacacacaagttgcatttgaaagcatcgtttaaagtggagaagtgccaaacagaaataaccaaagataacataacaacaaggtcaaaatgtaaaaaaatgatatgggcttttgaagaatttgtctttcttcttacctcttttcacggttgtttttttcttgggtaaattaggaactgttttttttaccctgtatagaaactttttttttggtcttttattgaaatttattaaattcaataatgggctcaaccacattagtcattatcaagaattgagaggttcatgttgttgtcgtcgagggaccaactaaagaaagtaattggtgtttgtaattttatgtcatgtccatttatttccccaacgatcttcttctttatcatccgacggtagtggctatcacgaaatttatcccactgccttcgcttttttaatcgttttgtactctttttacatattaaagttttgtagtatttgccaactcaatggattggtaagctttattctaattatagctcaacttgtctatttccagcccatgaggttcaatcgtcaccaaactatcaactctcacattcccaaaaattatgttggaacctttttttttcttttttcttttttttttttctcttaagagtttaagctatataccaagaaaatgattaactaaaataatttttctgttttttgtaattattttttatttattttgaattttaaaaaatcagtatattattttccctttgatacttttttaaaaagtcctatgaaaaacaaaaagagttatctcttgatgaatcttcttttctccagttaaagtgttttatcaattaaaggggaccatttttcaccttcttctttcccattgctccttttcttttgttgtttggcttttacatttttccatttattctaaaaaacttatttctttttcccaacatatcactatttaatttatgtttttttcactttgcactgtttccaatttttagcagaatcagcatccgaagttgcgaggacctaattagtctcaaaagtttcatctcattttttctgttttgtatgggtttattacgctgattagatagggaaaaatggtatgcttcagaagacaactagatgtgcaccgttgtgctcacatgaaaagacaataaatatctctttcacgttttttcggctagcaaatcaacaagaaaatggtggtcaagtggaaatatattatatctatatatatatatattatatatattaatgaataaaagcagtgtcgaaagtcttgtaaatcagctagtaaaaggctgattgtcgctgaaaaaaatgtttgagacattgttttttgtatgatcaaatgtttgtaacaaagttcttttagtaataagattcagttgggggaaaatagcatatggagtcttaattagtattgagactttaaatatgagagaagaggtaaaaaaacaaacaacaagaagtgaatatacaataaaaaatcaaaagaggtaaaaacagaagaagaagaagaagtgaattttacaaataaaaatagataaggcagcgcgaaacaaggattttggtgggagaatatatgcactgtttgactctagtcttaactcgtaccatatgtgattactactttacccctcttatattcatttatcgtaacaaaaagatcgagtaaaatagacagacacgttaccttcgtacacgtgacgtactctaaatggatcttacattgacacgtgtgtttcctctattggatgttttgtttgcttgaactagtggccattcaaagaaagccacagcacaatcataaaattaataaaactctttcttttttgataatatacaccattttttttttttcgtgtgctaaaacctaaacttatttccaaagtctgtttaccattttaatacaaccagaatgattccataactaaaatcgcatttaatacaactttcgtatataatatggttattggtttgaagactaattaacatttcagtgtgtgatttactcagtattacaaaattgtatgaactcaacaaaaatatttgttataaacactttagcaaaccaacaaatcatcagtgttttttacatagaacaaaatgatcagtatagtttaaaagttctttacattattttataggattatagatttgactatatataaagacatgtatgacttatgttcttcacatattatcaaaaccatcaaagatgaataaaagctcaataccaaaaactttcatactagaaaagttacaatctttaccaaaaatctagtatatgatataaacatttgtacttattctgtggttgtagaatatattccatcacataaattttaaaagctgatcttatacataaactaagactaaagttgtttaatcaccaggtccagagaatatagttccagctttattctactaaactcaaaaagtttaattttgatattcctaaaattaaattaatcaaccaacccatacaaaaaatttcattctaaaactatagattaaaaaaaagtaacgacgttgatcgcatcacatgactctctctctcactctttttattctgtctccttctaaataaaaactttccccttcctcttttctcactgagacactgtcttcactcttttttgcttatcaacaaactctgcacaaatcttaacctctctgtttcttctctttaattctctctttcatcgaaagaaacctcaaatttcaaatcttcgcattgtccgccattcttatacttcccctagagaagcttcttagggttcttagtttcttcctctgccgcgtcttctcaagtttaaaacttgtctcttcttcttcaaatccaatcaatgggtagagattttctagttctaagtattctcattctacttctctctgggattgtatcttcagctccttcagctaattctcctgcaagtaagcgtaatcacatttttttaactctctcttctcttcgattctttgtttaattgttttcaaatcttactccttttgcagagattcttaatgggtttatctcaaatcatggctcttcactaatgaaatggttatggtcactcaaaaccacaaccaaaacaagttcgaatcctcttccattttctgatcataaagtttgctttttaatctttttctaacgaataaaggtttctctttttttatgaatcagctattgcaacgagatcgatggtgaaattcgaaaatgggtatagtgtagagactgtgtttgatggaagtaaacttggtattgaaccgtattctattgaagtcttaccaaacggagagttacttattcttgattctgagaacagtaacatctacaagatctcatcttctctttcattatgtaagtacaaattttgtggtttattgattcttgaagagattgtgatgatgttgagaccacgattgtgcttttgtcatcacttcaaactgaatgcacatggggactatagtacaaaaagatgctgcatatggaaaaattgatggaattttttggtacttcaaattgaaaattctaaagtctgagctttattactattttatggagattttgctgtatctttgtcgtttctggagtgagtttgtcggggatgatatcagtatacgggtatagtttagtagtacatttgtttgctgaatctgactttttcaaagatgagatctaaaacaaaagtgtttgtttcaaatggttcagaatagaaacaaaagcttatattggtttgcaaaagtgtttctttctactatttggttgagttttatttatatggaaagtattggaaacacttgcagatagcaggccaagactggttactggctcccctgaaggatatccaggtcatgttgacgggagattacgtgatgcgaagctgaaccatcctaaggggcttacggttgatgacagaggaaatatatatgtggctgatactgtgaataatgctatccggaagataagtgaaggaggtaatagcttgttcataactgcattcatagaagggttatatatacgtttgcatcttgtactgagttttaaatgcctatgatgtgaaggagttacaactattgccgggggcaaaacggttcgaaatggagggcatgtggatggaccaagtgaagatgcaaagttttcaaatgattttgatgttgtttatgttggaagtagttgttctctgcttgttattgaccgtggaaacaaagctatcagagagattcaactccatttcgatgactgtgcttatcagtatggaagcgggtttcctcttggtaaacttacaaaagtaccaaacttttttttatgtttgtctctttttttctttgaataactctgaattcaatgtattgcagggattgctgttcttgttgctgcaggtttctttggttatatgctagctctgttgcaacgaagagtcggctctatcgtgtcttctcataatgtaagtgctcgtctcaaagactaccctggcttattattattctgctaaaactattcaaatatttcttacacaggatcaagaaatgttcgaagctgatcctgatcaaaagcctatgaaacattccagaccatctctgattccggctggagacgagcagctagagaaacaagaggaaacatttgtggtatcgctgggaaaactcgtttcaaatgcttgggagtcagttatggagatccttagaaaaaagcagacaggcaccagctttcagcagtaccatgggacaacaaagcagtctgctgcatttagcacatcaactccatggccaattcaagagagctttgtgattcgagacgaagacggacctcctcctgttgagcccaggaacccaactccaagaaagacttatgcttttatgtccaaagatgcagagaaaatgcagcagctacgtcagagccgcgcattctacagtagctgggacgctgagttccccaaccagcagcaacagcagcaaaagcagcaccagaagcatcagcatcagcaacaacagcagcagcagcatcgaaggcattactcatcgatcccgcatacttattatgagcaggacagtgaaaagtctaatgagatagtctttggagcggtccaagaacagagcagcaagcgtgtggctaagcctaagccgaagcctatagagtctggagatcaaatgaataataatactcaacagaatcttcactacagatctcattctgttagttacccatatggatactatcctaatacatgaaaagtctccggttttgtgcgtttctgagattatcagtcttccttaataagattatgcagggaattaaattttttgggtataggtgtttgtattggggaattttaagagtatgctctcgtcttatgagaaatgtctcatactttgattgtattgggtaatatatatatgaaaaaatgatatgattatctttgtgaaaaaagtgattatgtacattcccttgagcttgttacagcattgttaaataagtgtccaacataaggtttctcatttactagattcatacttacaacatcttcgaagtttataaagttcattagatttatcttgagagtttcatcgaaggctttgtgtcggtggaacaaggcgcaaagaacgataagatgaatacaaccatggctgaccctatcattttaagagaagctatatatgtggtattaaaaggaggttggttcaagagtgtagcaaatgagattggtttctcccaaaacatttggaaaatctctgtgattttcatatattacttttttcaagaatttagttcaggagaaaacaaagcagatttgatgtcatgttacattttattcagagatatgcatgataagtgatggatttatttgggtggttaagattacatacatggtatcttcacaaaagttttgaacgtgatcaaattttttatttttgtgtgtgacgaaaaagagagtgtaagactccgcgtgaaacagagggttactctgacggaagcttaaatcaaagacacatgagaggcacgtgatagttcggttttattttcttttcttttcattgtatatttcttcttccatacttaaagaggagtctatatcactcaaaatcttaccgatcttcacaactccaatttgttactgaaccagttcattttcagtaaaaacatactaatcaacagtacaatttattaagattcgtatgacttgaaaagttgaaacaataataacctagtaaaaaggggatcctccattagatacttaggaaaatatttttcttttctcctggaaatgtattaacaagtaacctaagcttcttttcgtacaaattaccacacaaattaaaacagtgacctaaacttcactgaattgtgtatataggtatcgaaactatataaattagagttttaaccattagtatatgcaggccataaaatagataaaccaagaagttcacaaagcatattgtagaattcagttttctgacaaaacatatataaaaaatatatagacaaactacattaaagaaggtaaaacatcgcaacataaagcaaactacaaatgataatcgataatacggaaaactaaacttcgacaccatagctatatagtaccgaagacaagaagaagaatagttttacaaatcttacgattttcaaagagagtacatttcggagattgctttaaggaacctaagcttcaacttcaaatgcacaatataatcaacggtctttgataaaagcagatccgggtggttgcatgtctgcccgcccggtatcagtatttggagcctcctcaccttcatttggagtaacccggatcgtgatccagatccgtgacccttcttgttgttgtttttcttcttcttattcatcgtctgcttcaccatacttttgtatttcttcgactcctccattgcctttttgttgagtgacaacactttagagttgtgatgcaaacgaacgtgcgggtggtccatatttatattgattctatgcttctaaaccagtaagaagcttttttacattattatgttttgtcttctaattcgtgcaattatggaatttgttgtttttaaaatgctcgcttacgtccacacgctcgatcttgtttatcctttttaattgtgcgatgagaaagcattatccaatattaaaaaggtattagtaacgtcggtcgcttaatcacgtgctggattcactaactttttgtgtgtgtttgatttttatgtagttgctgattcgaaaaactgtctaatctttttgaatacataagatatgatgaatcttacttagtttggtttacccatatgtttatatattatgattacaataagctacaagtgagtcttgggctagtggagttacataggtcatcctcggttagattcttgtttaaaaacagccatatatattgcagttccgattgagaatacacatagccattgccaaagatttgtatacgatattgacatttatgaggctaataatgcaatgtgtgtgtgtgtgttcctaagagttggggggtattgttaaatgtttttaggccgacactatgcaatgtttgtaagtgccaactggatactatgcacgtgttttcgacagcttagcttttgcaaactctcgtttgtagccatcgatactcgacattgacgtgatctctcatttctctttgtcttttttctcattaatgtgcatggactaattactccacataatacttttaaattatcattgttgattgggattgcatagttacacaagtcttttattatctatgttgaactaaaatacaaataaaaagaagataaattatacataccacccaccggttacaagaaaaataacaaatatacccctacatttttcttcatacagtgggaacctttgagccgattaattaatcagttttttcggtaattttattaatcacaaattatatactacaatcgagatcgtggcatagtgatttcacgaaatggaccactctacgaatcacatgcaattgtatgtgtgataatgaacaatgatgattgatgaattggaagacttcaagtgggctttagtttcgagtttagggtttttgacagcctgaccaagatggctatgtgtgtggctgtctgagtgaccaatgaccatttgggttactgttattaccctttcggcaaattaacgtggctgataggtcactttgggtcccattccaccatcatttctcaccgtccgattcgatcattgcccatacgtatttccactactgcatggatctctatttttattttatttttctataaatttgtacaattttatttatatatattgaagattgttcatgcatggaagaggagaggcaccgtagtctacggaaacaggtccctactattgtatgtttccctcttttaggggttttttgggttaatttggcgggatcccggaacatcttattgcaattatttttcattttcccccataaaacattagtgattcgaaaataatcttatttatacattagctttaaactattacactacaataagtgtttttgaagactgatacacgaagcatgtgatctttttgaaatagtataatgatcatacggtggcgcattttccaatttatcggcttctttagatgtaaattatttgtacatgcatgtgaattccacatgatgtgtttaatatatatcatagtctatgatcgcaagttcgcaacgattctttcttgattgcatgaaactaatttatgggtttttatcgggtaggaatatatataaatatatcaaagttcgttcatgtgatttgcataaatgtcaacatgattgcatataaaatattgttgattaattcttccctcaat

SEQ ID NO: 131 - DNA, 87400 bp, Arabidopsis thaliana
gaattccaacaccgtgagatccgacgtcgttttcgactttcttgatctctctattactaaacccatacgtaataacacgatcgatctcttctttagaaccagagtaccaaccgtacctaatattcgcgtaaccgttgttcttcctcttcatagcttctgtgaaaagcttgaacacagcgaatttagctttcgttgtgattaatctctgcgttaagatttttcgtacggtgacgattgttgtttcggtggcgaatgagcccattccggagaggaaacagtttttgatgaggttgtgttcgaaggtggcttcacggagaagaatcgttgcatcgccggagaagttaggtgcgttgtcggagatggggttgatgatttcgccgttgtctaaattcgtgacggattcttgatcttcgatctcgacttgtgccgccattagaaaagaagaaagagagtttcttgagaaaagagaaagtggagaaaggtttgttttcaatggcggttttagggatttgcagttataaaaggtgagagagagagagagtggcggtgtggtgatttgttcgtactacgtttaaagcgaaaacttggacagcaagttttctgatttctacttctatttttattcaattactattttacccttttagactatatttagaaatgagaaaacccaacgttatttgaaaaaaaaaaaacacattcaatgtgtaatgataaaatttgaatttgaaattatgtgattatggtttgtgactaagctattagtctatttaaaaaatttgggcaagggtactaaaacttagaaaaataaatataaaccaagtaaataaatgcgacaaaaaggaaaaaggttacgtatttcaatgtcggttacatgtattattatagtagtgttcgaattctcctctacgtatttttttctttatctgttccttaaggttaagttgttaacttgtgaaattgggtgttaatagaagattcttccattaggttccttccacatcacataattctgttttttcattcatgtataataaattaataatacaagaatatcaaagaagaaatatttaataaattattttttgaaataacataatttcaatgcaagtagatatatctctctatttttttcaaattgaaatcttgtccgaatgccccatgcttaaagacgtatatatatatatatatataattatattgttaattactgatgatagaaaaatatgaaatggtatggaaaacattccaaaatttctatcatttgaaaaccagtagaaatcaaaaggcccaaaatatttaaaagcctggttcaggcctgaagccgcatcaaaatcatgcatcaatttttctggcacaaacgggtcgggtcagagaataagagttccaaataataattcaaaaacaaatccatcaatttagcgcggtaacccggatattctaaaaaatgaaagtgagcaaaaaagaaatcaaatgttcaaaacaaatcatatatatgaaagttggccaactctctccatatgattgacacatcatcactttagcatttgacatgtgtctattaattatttaagcttttcaacttctaatttataggttaatgatatatttcttattcaattttattttacatatttaattatactattactaaatttatttttattttatatgatttttcaataaaactattttaatagttttctcatattcgaagatttttttttgtaatcaaaactcaaagtatgaatgtataatagtcgtggattacttaatgatttgagtaagttattctcttaaattgatatttatattctcttatgatatttatataataaatcactgagactgaagaataagtaaggaactctatcatcaaatgcttaggtttctagaatccaacactaccttctcttaaactggtttaagacaaacgttgtttatgaattatatgtatgatgcattgttgaaaatgttgttagaaaaaaatatttttaatattaaaagtaattgcttattgcacgagtgaatgattaaataaataaaaattaaatttaaattaaataatacaaaaaaatccgaaaaaaccgcggggcgggtgaacatctagtaaacataataattagagagagccgcatttttggatcaaacgcccacacgaagacgtgcctacaattaactcttatcatcgatcactaaattctaaactagatcatggcgacttttttttttttttttttaaaaccttgacatcgtcaatttaaactagttggctctgtaaaccttttgtttttttcttttcttagaaaagatctttgttcaaatttaaactacttgtctccagttgaacagtaaaataattatttttgctacttggagttgatttaatcaattgatgaataaggaaaagtttcattagagagagacgataactctctgcttctatgaagtggttttggatttctggataacaggaacaattcaaagaatgtggagattaaagaatcagaagaagaaagaaacggcagattcgccgagttcttctccaacagcaccgtcagtcgattcagcggtgatgggaagtggtcagactcattttacctatgaagagctagaggacataacagaagggttttctaagcaaaacatacttggagaaggaggttttggttgtgtctacaaaggtaaactaaaagatggaaaacttgttgctgttaagcagcttaaggttggtagcggacaaggagaccgtgagtttaaggcggaggttgagattattagccgtgttcatcatcgccatttggtatcgcttgttggatactgcattgcggattcagagagattgcttatctatgagtatgttcctaaccaaacattggagcatcatttgcatggtgagactcttttaccacttttttcattagacaagattttcttgacatgtttttttttacttacattggttatgttcttggacagggaagggtaggccagtgcttgaatgggctaggagagtcagaatcgctatagttctgccaaaggtttggcgtatttgcacgaagactgtaagtactttttgcgatgtttattcagtttcaaatagaagctgaatcaaagcgactttatttatcttgttttgcaggtcacccaaaaatcattcacagggacataaagtccgctaacatcttgctggacgatgagtttgaagttcaggcaatctttgagcttttgactctgtagttttagttgatgtgagttttatctgttcttagacttctgtttcttgatgtttaggttgctgactttggacttgccaaagtcaatgatacaacacaaactcatgtctcaactcgcgttatgggaaccttcgggtaagattcacgtaacgggggtactcttatagtgaacctatcaaagtatatatctccatttgagaagaaaagtccttggcagtatcagtgtgcttagccttctaaatctgattgtgatgaactagtacgtatagagaggttaagaggttataaattgttgaaaagtacataagcctctaatgttataggcttttgttatcaggtacttggcaccagaatatgcacaaagtggacaacttactgatagatcagatgttttctcgtttggagttgttctcttagagcttataactggacgcaaacctgttgaccggaaccagcctttgggagaagagagtttggttggatgggtaaagatactaatctgtcttgacatctccatatatggttggactttgctctagttaaatactaatctgtcttgacatcttcataggctcgtccactacttaaaaaagccattgagaccggtgatttcagtgaactagttgatagacggctcgaaaagcattacgtgaagaatgaagttttcagaatgattgaaacggctgctgcttgtgttaggtattcaggtccaaaacgtccacgcatggttcaggtacatttctaataacattattcgtagccgcacagctagcactatgactaatcaaaacccacatatatagcaacaaataacaattttatacatgtcatgtgttctttataaaaaatttgaaaactataaacaaaacttgtttgaaataaggttttgagagcactagatagtgaaggagacatgggagatatctgcaatggaatcaaagtgggacaaagcagtacttgtgacgactctggtcagaatcatagtgtgataaaggacgtcgggtctataggaagaggaggaatggtggtatcaggggtgagggtggtcacacgtttgatggttgatgcttatcataatcggcacgagggaaagaaagcagagagaagaatctgaagggatgctgaagatcctgatctcactttttatttccatttctgtaatctgtagaatggggtgctaaaactaataacaactttacttacttgaaattgaaatacttaaaaaactaatgcgtgtttacatatttcaatgtcggttacttcgcatcttaacagtgtacgactacgaattctcttatatttttgttgttctttcctaaaggtgagtacaaaaatattggtaaattactcgttaacttgtgaaattgaatattaatagtcttccttccacatcacataactcatatttttggataattattcagatataataataaaattatcttaaaatatattctctttcagtttaatattagttgtcgtttaaacttttttcacgaatattaaaaaaaaatatattttttttctgttttacctctaattaatattttatttaatttgatatcatcaataaataaattttaaaaatatggataaaacttgaagatatgtcaaacatcagcattgaaaatcataaggaacaactaattgacctttaaaacgacaactaatacaaaacggaaaaatattaaatttacttgcactgaaattatgttatttcaataaaaaaaaatttcttgcattgaaatcatgtccgaaactccgaatgcaccatactaaaatatatggttacatctagggacggatctacagtgtaaggaggtggggcacatgccccacactaatccttgataagtatttaattgttcagcttattacattaatattggtaagcttatttggaagaagtgccctactctatgtcccagaaggtgtgttcgatacccttacactggtattttatttcatgtttatattttccccatatttattattttaaaagaagtttcactaatatggtgccccatacagttttccgccacttacatcttacatacgtgtgtattacaaaaaaatgttttctcaaaatgatattatgaccaaaagaaaaagataattcctagatttctatcatttaaagaacaagagcaatcaagaggcccaaatatatattgggctttataagcctggttcatgacttacaaacacgtcagagtggcaaatttcaaacgggtcgggtcgtattcaaaaaagaaatccatcaattttgcgcggtaaccctgagattccagaagtaaatagagcaaaaaaagaatcaaaacaaaataatataatagagagagccgcatttttggatcaaacactcacacgacgtgcctccaataaactcttatcatcacaacaatcactaaattcaaataaagatcatggcgacctgttacaacattattattcctttcaatttttatacgaaggtaagagagaaagaggacctccattaatttttaccttgacatcgtcaaatttttataattccgtaatggcgtccatttctcatctttctccagctatcattttttttttcagtgattagaaaaatctttgttgatttgggagtttaatttcagattttaattagttgtttccagttgcagaacagaaaaattatattagttgatttattattcaattgacttgttttaatcaattgatgaataaactctctgctttgccttgtatgaagtgattccctaaaacagagagatttctgggttttagggatttgagtgttgtttctgttatacagaaacaaattcaaacaaggcaaaaaaatgtcggactcgccaacttcttctccaccagcaccatccgctgattccgctccgccgccggatacctcatccgacggatctgctgctcctccacctacggattcagcaccacctcctagtccaccggctgattcatctccgcctccagctcttccatctcttccgccagctgtcttttctcctccgccaactgtctcatcccctcctcctccgccgcttgattcatctcctcctccgccgcctgatttaaccccgccgccaagttctccccctcccccagatgctccgccgccgattcccatcgtgttccctccaccgatagactcaccgccgcccgagtccaccaactcccctccacctccagaggtgtttgaaccaccaccgcctccggccgatgaagacgaaagccctcctgctcctccacctccggaacaattacctcctccagcgtcttcaccgcaaggaggacccaaaaaaccaaaaaaacaccatccaggaccagccacatctcctcctgctccttcagcaccagccacatctcctcctgctcctccaaacgcgccgccacgtaacagttcccacgcactaccacctaagtctaccgctgcaggtggacctctcacctcgccatctcgcggagtccccagcagcggaaactctgtcccgccacctgcaaatagcggtggcggctatcaagggaagactatggccggttttgcaatagccggtttcgcagtcatcgccttgatggccgttgtgttcttagtcagaagaaagaagaagagaaacattgatgcctacagtgactcacaatacttgcctccttcaaacttctccatcaaatcaggttaaaatcttgatccattctctcatcttcaagaagatgcacaaatgtttaaacatatttctttcgctttaacgtgtagatggattcttatacggtcaaaatcctacaaagggatactctggtcctggtggttacaattcacaacaacaatcaaattccggaaacagcttcggcagccaacgaggaggaggaggttatacacggtcagggagcgcacctgattcagcagtgatgggaagtggtcaaacacatttcacatatgaagagctaacggacataacagaaggattttctaagcataacatacttggagaaggaggttttggttgtgtgtataaaggtaaattaaatgatggaaaacttgttgctgttaagcagcttaaggttggtagcggacaaggtgaccgtgagtttaaggcggaggttgagattattagccgtgttcatcatcgccatttggtttctcttgttggatactgcattgcggattcagagagattgcttatctatgaatatgttcctaaccaaacattggaacatcatttgcatggtgaggttcttttttaccacttttctcatcagacaagattttattgtgtgtttttttttacttacatgggttattttcttgatagggaagggaaggccagtacttgaatgggctaggagagtcagaattgctataggttctgccaaaggtttggcgtatttacacgaagactgtaagtacttttgcaatgtttatgcatttcaaagttcaaacggaagctgaatcaaagcaacttaatttgtttatgtatgtttttgttttgttttgcaggtcacccaaaaatcattcacagggacataaagtccgctaacatcttgctggacgatgagtttgaagctcaggcaatcctttttttctttgaacatttgctcttttttggagttttttttggctctgtagatttagttaatgagagtttatttgttcttagttttctgtttattttggtgtgtaggttgctgactttggacttgccaaactcaatgattcaacacaaactcatgtatcaactcgcgttatgggaaccttcgggtaagattgatcacaaattctttattaaactactagatatgataaggatgaactagtttgcttgtatacaaaggttagaaggtattacttattgccatatattaataacatctgagaagtacctaagcctctattttgttggcttttgttatcaggtacttggcaccagaatatgcacaaagtggaaagctgactgatagatcagatgttttctcgtttggggttgttctcttagagcttataacaggacgcaaacctgttgaccaataccagcctttgggagaagagagtttggttgaatgggtaaaaatactaatctgtcttgacatctcaatatatggttggacttggccatagttatttaaatgatctaatctatgaactctcaggctcgtcctctgcttcacaaagccattgagaccggtgatttcagtgaactagttgatagacggctcgaaaagcattatgtggagaatgaagttttcagaatgattgaaacagctgctgcttgtgttaggcattcaggtccaaaacgtccacgtatggttcaggtacatctctagcaacatataaaaattctatacatgtcatgttctatgttataaactttgaaaacttacaaaaaactttgtttgaaataaggttgtgagagcattggatagtgaaggggacatgggagatatcagcaatggtaacaaagtgggacaaagcagtgcttatgactctggtcagtataataatgacaccatgaagttcaggaaaatggcatttggttttgacgatagctcggattccgggatgtacagtggagactactctgtccaagactcccggaaaggatccaacggagcttcctctgagttcacaaggaatgaaaccgagaaccgaaacttcaataaccggcgctactgatccaaaaataggtcaacttatacctaatcatccctcatgcttgagctctttgtacagcattaatgctctctttgaattttttgtgtgaagatacgtttcttgctagccgctacctttagttttgctccataattcccatttgcctcaaaagacttattataggtgagaacagagaaaagcaaccaaaaaagaaaaagaactcataaaagttcttaaagagtgatttgaatcttgtttgcttttgtttgcttctctgtgttgagtttcggattttttgttgagtgtgataacataaatgaagaactccatcttctgattttttttttttacataatgagtcttctaattgttacttgttatctcatattttttttcttgctttcatatatatttgatacctaagtttcatacccatatgaaacaaaaccaaacgacccaaaacaagaccaaaaacaaacaagcaagaataagataaagtgaacaagcattgatgaattctcttgtcttattaagacaatgttctgaccggagcttgaagtcggaaacctccgtgtctgaggtcaccttacacatggttaatatataaccggaggtggtcttttccctccttttcctccacctcctccaccaccacctcctcctctcttgttatcaaacccaaattctatgtcccctccgtttcgaccagtgggtttgctcataggaccaggccgcttcatatcgaaaccaaactccacatcacctctttctcttggttcacgctccacaggtctaatctcacggctcttctttgacgatggtttctcatgcttcgaagctttgttgttgtttttgtctttgtgttgctttccaccgcggttgcatagtcttccaaacacacaagccagtgctgccagaacaagaattgcggctagaactatgaatgctgtaccaaacgagccacttgaaccggaggatgaaggcgagaaagaagatgaagtagaagaagaagtagatggatacacttgtggttgctgaaactcttgtggttggtctcccattttattttattttggtatttgatatagatttatgtgaggtatatgctttaggagctctatgatgttgaagactacctcaatttatgccatttccataggaaatgaggccaatgtattaatagtactagcactcactcctttccttgatcattctctgtaataaagtttaagtgagacattgtttttttttttttttttttgaaataaagttacctatagcttacttttgtggaaattatcagtttgttttttgttttctttttctttaataaagaaatatagttgttttttcttttcttttgttatcaacaatgtggctatgtttaagagatgcactttagaggattttctgattgctttgtatgaagagaaagtgggattttggttaagaattttgagatgagacacaatttcattgtttccaagaaagatgaattaaagatttgatgagtgggaagatgctttaccaatcattgactctactctttagattcccatttcccattaatttatacacttttttctctactcttcaatctctaattttcaattccgtagtgcttgaatgtatcttatgtattctatatagtatattgtaataaagttgagctaaatatcaggagaacaaaatgatgagtttgcattttcaaataaaagtaggattatggatccactagtttttgcgaatagtactcattcaccatcaaatcttctttaatggtaagtgttaagtgttaacccttcttgtgagtttcttctaaccgaatctatttactttagttctgtaggtagtcttttagagtggggttccacaagagagaatgtaatcggaatgtatttaacatagggattagtgtaaaacacattttatgttcattctttcacgcaaatattagtttcctcttttctttttcatatttctttcaaactttttgtctccttgaatgtctttttcttcctcagaaaatgttgaagtgttcacatgtcttcttttcaatgccttgcctaatgggatcgacctttagattttgaattttgattctataatatcttggtgagacttcttaaccaattagttttctttagctcgtgcttgagacttatcacttatgtaacgtttttcatatctcttggtttatgttttgtttggttttgatgtttttatgtttcttgtatttctggattttagtttgtttaaaggaaaaaatacttatgcgagattttaaatagtaatttaaaaaaagagaaaaaaaatctcgattagtgcccgcaaacgttagaccgacactgggtctaatgcaaaagaattaaaacatagaagcataatttataacacaaattctagttcatctactcaatcaaaacatccaaactaatggcgttagtgaagtaattacaattttgcgattcttcgcgaattagttgaagaagacgaaagacgagtgcaacttgtagaagcctacaaagtttaaaacccataatttgatggggtcaaaaagtagaacatatcaatgaaattttttcacgccagtgatactcgtgaactttgtatactcattccatttctaccacatttgcactcaatacaatcttttagaatcataataacttcttgagaaaagaacttggtccaagctagtgaaatcaaaaaggtacgttaaaaaaacaaatatcttacaaacgggacgcagttttcacagtaagctaaaaacggcacgcaggtttctaaagagtggcgaggatttcaacgttagcttaatttttccgcgctaagaccagctaaaaaacgacacgtggcaatcgtgttcctcaatggtctctttcgtccaagaccagaaaagagaagaaatgtggccactctagaatccgtcgcatctcgattcaaagctattgataatttcgtcttcttcttccatggaataacgtgtttaggcgtgtatcacatggttctttctttgtgtgacacaaaaccaacataaagcttccatacgatttagacattgtcgatcgctattgtaagatctggtctgggtcctcgattttggtgaggattgtcgggtggaacaaaactctttcttaaaggctctgcagaaattaattctctgctctggctggatctgatagtgattttacagattgttcaggtgctttattgggctgtgtttcttcgttagtaaagctttttgctttcctttagtttagtgaaatcttaaaaatgtttaactttgcggctttacttcaattgccttatacactgtgcaggtcagaaatgggcaatccgggatcagacacagagagaaacaagggaaatgtggtctcaagtgtgtttgatcctgcactctctcgattcgttggattttcccagaaactccaaactcgtcttaaggtcatgctctgattccacacattgcttttcaataccttgtgatgtttttgatctttagaggagctgaaaaaggaagcattttgttctctttgtcacagtcccagctgaagaatttgacagatgataagcatgggattggttcttcatggaggcaagataaaggaaactcatcgatctccatgcaaattgatctggagaaacagttagattgttggagggaaaacccttcgtggactgatcagatcccagtcgttaaggtgagcaagagatgaactttacaacatggttttgtcagagtctttgagaatcttgttatatgataaataataacaagatttctttacaggtgggtattccaaaaggatcgctttgcaatcttaaagccgaggtgaatgttggtttacctcctgatgcagtctataacattgtaattgaccctgacaatagaagagtcttcaagaatatcaaggtacgtttcttatagattatcttgttctctctgttacagttttaagctcctgtgattcattggcctcggaattacaggaggttatgtcgcggaaagtattggtagatgacgggttaaggcaagtggtggaagttgaacaagcagctttgtggagatttctctggtggtcaggaacaatctcagttcatgtcttggtggatcaggatcgggcagatcactctgtaagacctctacgattataacaaaagtctcaagtttcttgaatggttcgtgaaaggggatttaaatgggtgttgcagatgaaattcaagcaagtgaaaagtggattcatgaagagattcgaaggaagctggcaagtaaagcctttgtttgtggatgaacatatgtgcgatcgtttgaaaccgaaaacgctggaggagtataacaggtgcactggaggtaaagggaggatcggatctaaggtaacgctggaccagctaatacagccagcgattgttccacctccgcccatttcttggtatctcagaggaatcacggctaagacgacagagatgcttatccatgacttgttggctgagaccgccaggatccgtgcagctggagtaatggaggatggtcactcgcccgatgagcaacggattggcacacctggagatataaaagaaagatggtctgcacatagaagaacatcaaggagacgacgcaatgatttgtgttaagtcacagactcacacagtccatgattctgggataatagatatcttgaggatttttggatcacccagcaatatgtgaacataatataatatttgttttcataagatacactggcatataaatgtgggaatctattccttgttgaagaagtttacaaccatgactcaatgactcatgaccattacaaccatgactcaatgaccaatagtgatatgaattttcaaatatacaaaatttctaattcatttattttggtaaagaaagaaagatatttctgtgatgaaaacgatgcagacgtgaaaataggatacgcaaaaacaagaaagcaaaacaatcaatcatattaatccaggcacaatacacgaaagctatttaaaagggttcttctagtaaatttttaggtacaagaccatctacttgcacaataagaaacattcacatacccaaaaaagcaaaaaggttcagataatatttataatctctcttgcatcaagacagagagagatcccaacacagcagacagaatcatctcgatgcaacgcaatttctccctcatcatgcctgtgcaagaagagcaacacgaggtaaagatataagcatcgcagaataaaaagaaaccagctcgttagatttgtgtgtttttgaagaaacttatgtagttatgttaccttgccagcgatgttgttggagagccagtccagaccttcataaagcccttcacctgaagtggcacatgtgctctggatatacctgtagcgagcaaaaacacacatcagtatcgaacagaaattgtttgacttttgaaacttataaggatgtttatttaccaatgacgctgacggagggagtgaaggccaagcttatctgtgatttcagcagcgttcatagcatttggaagatcttgcttgttggcaaacacaagcaacacagcatcacgcagctcgtcctgcaataaaagagttggtaagtaaaggattttcaaactaacaaaactatgaagaagaactctttctctatagcactggatatttacctcattcagcatcctgtggagttcatctcgagcctcaacaactctgtctctgtcattgctatcaacaacaaagattagaccttgagtgttctggaagtagtgtctccacaagggacggatctgaaaaagaagccaaaaagtcagtttatttgggtgaaaagttccttcatcaaacaataagcagtacagagactccataccttgtcctgacccccgacatcccacacggtgaaactaatgttcttgtattccacagtttccacattgaaacctgttgatagaatttagcatatcactaatcgatcctagattttataccatcatcacaatttaaaaaccagtactaaggtgtgaagcttctttaccaatagtagggatggtggtgacaatctctccgagcttgagcttgtacaagattgtggtcttaccagcagcatcaagaccaaccatcagaattcgcatctccttcttggcaaaaagcctgctaaacagcttggcgaaactcaaccccattttgcttcactgcaaacaaacacaacaaagtctaatatcaaaaacctcatacacattctatatcacgcgattttcatctcagaaatcctaaattatgcatctataatgccaaattcaattcttatatcctctaagaacctgatcaataccaaaatcgtcactcacaaacatcaaatttcaacgagatcaggccgatccaaacagagaatcaaacgtcccgagatatcataatctctctgatacagatcttcaacatctcagaagctatcagatacaatcacaacgacggaaaacgaaagtgaatagaaaattcaacagatccacactatcagatcgtaatcagaaacgtcgacatatatacacatcttaaaaataaaatcgcattatccattcatgagcaagatcaacctcaacgaaatcaatcacgacgattccaaaaccatcaaaattcacaagaaacgagaaatgcagaacacatacagatctacgctaaattgagaatgtatgagcacagatcttagatcaaagcgtacctacgaagaatgtttcggagagatctgagagagagagaccgcgaagaaacggagagagcgagagagactcgaagaaatttgaaagagaaatgtgagagaagcttaagagaaacgcgatgacgccgaaatgggaagtggtggagagcaattttataagggagaggggtaccggtttattcgtcgtttctcacgccaattaacgaaattgccatttgtaattgacggaattaccctcttcgaatcttctatgaccaagtgtgcaggtgttcgcgagctaaccaattaaaacttaacacgtgagcaatactcttttcttaagtgctacttcatctccagtgaaaatttcgttatttgttgatgttgtctgaccaataagaaatcgtcatttcaatcaattttgataaattttataattattaaaataattttaatatatataatatgattacatatctacatctattaatgatatttttaatgaaattttgtttgtctggtttggttaactttgggaaacgttagccacaaaatcatttaaaagatttattttcaaaatgataaaattaatcaattgagagacaattccggtttagtattagcttaaaaatttaaacatttgggtctggttttgctgccaacccttaacgatcataacaaaacatagagagatgagcaaatgctacaaactaccaaataagcattcattttttatacaaaaatattaatctttaccttaattataatcaatttataaacactacaatgcttttcaatctcattgtatatgcttcattaacaagctatatatataaggtcagttgctaaagatgaattacaactaaatataacgtgcacattcctcactacaacgaccgtcaaaatatgtgatcaccttaaagctcatcatgagcattttcagtttctttttcgaccataatagtttctgccaaatactgatcagtttggtttaagctcttgtcgtcatgcgaatacagacaatccgcagaaggatgaactacaccataaccaaacccttcagcagagttacaatatgcttctacttttccatcattgccttccaagttgatattgttgaggacaatgtggctgcaagggactgcgtcactacacttgaagttgatggcttttgagcttttcgtggttccggttatgttcctgtacattatctcggatatgtgaaccgccgatgtctgcaaagaaataggaatcaaaagattaagtttctttcttgaggtttgttgataagtcaatggttatgtgaaagaattaaaacctggttttgacaagttgatggtgaatcacagtagaattgatcgattataatcggattcgcaacgtcctgcatcactacgttctcgaaacgtacaccctttacgtaaccattaccaccctgttttaaagagtttcatctttcaatcaatcctgaaaactctttggaaggaaagcaaagatcaatagaattgagattttacctgccatgtcttgattcttagaccattagttgtgttctttaagaacgcagtttccaacacaactgcagtgacggttcctttcgaatgtccttgtccaagacttccaatactacagaacaagaaattatttgcaatcaataataatatatgtgtctcatttctttttatggttagagatggtttacctgattccatgtcctggtccacagtagatcctcttcatctttatcttggcgcttccattcacaatcgagacacaatcatctcctgttttcaagttgaagtgtcagctataacattttgagtttaatattataattaccatgatagtgttttgagttaaatagaagtttttggtgaagaacctgtgctgattttactgtcttggactacaacatcggtagatgcggttatatgaattccatcagtgttgggactgtctcctggagatgtgaccataactctagagattcgaactgtagttgaccgttgtatgatcaagtgcatctgttggctgttccggatagttaagcctctcacatacacatttgaacttgaatatatagttagagcctgtataaaagtaaagactttcttataagcaaaatcaaacataaatgataagtctaatggtcgatgaacacaaaagggaaaaaacttagaccgttggtgcgcctacgcaaggctacaaaagaaaaacaagaaagatatgtgtcagatttctacttcatgattgattagaagaaagtccactttatgtaaagaagatacttacgttagacttgttcttcttgcaagaagcagcccaccatttggtaccagaaccatctataactccattcccttggaatacaactccttggagtttggaaaattgaagccaattccttgggaatttcgggtcccattggctaggctcatctggtgctatgattgttccatcaatctatcaaaatcaaaattaaaaaaaaataaaaatgcataagacaataaatggtaacatgttgttgtagcttaacgtgtaacaggaattaagaagttaaaagattacctgaatgatcaatttttcttgacatggaccatcgaatttcgtcgcatttactaaatagctacgtccttgtggaaccaataaaacagagtttggtgcagagcaggccatggtccaagctcttataaatgcctggttataagagaaacttttcactagttgataattaaaatatatatatatggtggttttgtgtgtctattccaccagcattatcatgaatttcttaaaccgattcgagcataacgcacctgagtatcatcagaaactccatctccagatgcattaaagctatccacattcaccagattcttaccagaatattggcttgtaaacgacgagaaatcaaagaaggtcacatcatcctcaatatcatcctcaggtacatcgaggttctcaagcttcccaagaatgtcaagttccttgaacaacatttttcctgtagctccataagaagctaccatcaacagagcaaacagagaaataataaagggtttaatcattttatgcttaagaaaaaaagaactccaagcaaagattaagtgattgtatagtttaagatatgagattttatgcaaaaatgatttctttgtaatgagatgataatatggtttgaatatatatataagcagatcattaaggcgattttattggcttggctttaaagtagatgaagacaagcccttaatacaaattcatctaaccttaaagcacaaggctcccacttctttgctttactccaaaaactctacacatattttcctggtcaacatattgatcccattaactctgagaaaaggacgcataaagctaaacatgtgacatttaaacattttttttaacttgtgacatttaaacatggtgccatatatagtttggaaaacgaaaaatcaaacatatagttgttgtcccatgcatgtaaatatatatatatatatatatagtactataggtcaattgttgtaccaaccttgagttgaagatttgatacgttcaaaattttttttttagagaggttgtttactcgtaactaaagtctttgaagaaaaaaaaaaaagtgttccttgtgataattttacagaatggatatacagttttagaatggatagatgactagacgtaaacatatactaaaaatgtgaggtttttacccatttaagtttactcctcagttgattctcatttaagttcctttgaccaatttaaacccatatatatagacctatttactatagtttcgacattaccacataggcgaaaccaagttagattaactcaagtgttcaacgtgtgatggttaatgaaaatttgatgtacgtttataactctcataagatatacaatacatctctaacgggcccttttacctgataagacctaaaaggaagagaggaatttggaaaagaattagacatatcaatgttgtgtaaagataaagagtccatcggtggagtgacatgactgatagtctctggacacacttccgtatttcataaggtcatagcataatagacacgtcgatgatagcttcaacacgtcgatgtcatttttttccaaaacaactgatttgttttttgtgctttaagcgtgtgtgcccttgttctttgaggagaaaatataacgtcgacgatagcttgatcacagggatcactctctactctctagcctgtgaggaaattttaatctaatatgtaaatgattctgagggtttaaagtgaactagggtttcagatccccctacacatgggcttacacttttgtaaacaaaatggggccttaagcccattaaagaatgataaagtctagtctactacgagactcgtagtacggttctacctctgcctacctctgttttcggcttcctcgaccgtttcgttttaaccgttcgatttgatgactgcttctgaatcgaatggctctaattaattgcaagtattgacgaataaaatacataaacgtgtggagtgtagaataaaaacatcagattcgaaattcattattttccattttccaaatcataaaatcacagaggagaaagattctcattgttcttgctcacagaatctgatactgaattgaagcaaagcatcactacaggtatctttttattttttttgtcttatctaatcttttttttcttttcttgattttactttgtctcgttaagtaaagaatctgtctcttgctttgaatgctatacctctctttatgtttcaagttttatctctctctctctctctctctctcgttgtccattgttattgctaaccaaaaaacaaaatcaaaacccgtgatgtctcatcatgagtttctcgcctctactttttcttttcttgacgtgaatttattagactctatgtgttaaaacttaaaatcaagatcacttggtttcacaaagttatagagattttttttgagaaatggtgaagaatgtgtttagcagaattgatttgtcgagttttattacaggttcaactgaacatacttggcaaccaacaatgacttcggagacaaacattccaagttactggcttaactggagattcttcgtctgtgcaatctttgtcttaacgtctctgtttctatcttcttatctgatttggagatatgaaggaccaataaaacgcaagaaacgtggtgatgatcaaagcctggagctagaacaactcacaggagttgtatatgatgatgaatcttggaatactagtgtcaaagagattcatccgaattggttgttaggttttcgtgtttttggttttgttgttcttcttggacttatctctggtaatgctattgctgatggaaccggcattttcatcttctacacacagtgagtctccataaatattttcttgattacataaagttgataacaatttcacttgttctgatgagttttgattggttcttatatatcagatggactttcacattggtcacaatttactttggggtatggcttttcttcaccttatcatggtacttcacatctacctgagattagtagtggttacacattttggtttttcgaaacctaaagtcggcttgatgtattgcagcttggatcattggtgtccatatacagatttaggtctcctgataatggtgaaaacagagttagtatagtagatgaagagcaagggacgtatagacctcccgggaatgccgaaaactcgaatgtgtttaaatcttcaagcggacacgatagagaaaacatgtctacacgtcaggttgcaactacattgggttacattcatcagattctttttcaagtaagtcttcctgagatttttaagtgtcaaaacatgttacgttctctgtttctgaagtctgaacatgtttttggatttgcagacttgtgcaggagctgtattgctcacagatggtgtgttttggttcattatctatccttttctcacagctaaagatttcaatctcgactttgtaagttttaaccaagacagtagacactttgttttagattttcttgtggctaaaatttatccaaacattactacagtttattgtgattatgcactcggtcaatgctatcttcctcctcggtgaaactttcttgaattctctggttagtcaatacaaaaacatgatgatggatcaataatgatgattatatttacagtgatgatgactttttttagtgatttccatgtgtccagcgattcccgttgttcagggtttcatactttgtggtatggaccggcatattcgtgctatttcaatggattgttcatgcttgtgtctccttttggtaatagtcacgttaactatctttctttacattatcttatgaacagagtagtttacttgcttgggatcttaagctatgtgtataacagtgtgatatctgtttgtgtaggtggccttacccattcttggatttgtcatcatcctatgctcctttatggtactcaacacaaactcatcgcctattatatcggttatgaaaacttgtgccactagatctagagatgaaactagatgctaaagatgaatggatttagactacacgtagattctagattctaaagatgaatggatttagactacacgtagtaatgtttagctgatgttgcaggtatgcggctgttgggttgatgcacataccatgctttggaatatttgctttgatcgtgaagttgaagcacttgtggctctcaagatgttactcagaaggaacataataacatatatcatatacatatactcaaatggttaacagagtctctcatgagtcttaaacagagttcaaagaagaaggtacatgtaggttccctcctgtataatcacttagctagctagtcaccattcttttggagggggcttacaaataaaactgttcttttgatgattacttttgttgtattgttgcatcgtgtgagattagttttgaattaagcatcgtccaactatgaaaaacttacaatacaatatagtcaattggagtttttgtattgagtcgcaaaaaaaagaaaaaaatgcagttagacatgtaatattggaccgtatccaattctatgggccgagatgagcccattatcacctttcgaaatgcgtctttttgcacatctaaaaattagccaattttttaatgtcgaaactcgaaagagagagtttatgatcatttaaacaacattatttactatagtggacttaactaaaaaaaaatctctttcctctaattaggtgataatggagataaaagtgattatgataataatattcgtaagtgatttgagacggtcttcgtgggcctaaaagactaatccttcgcatatctacttaagagctttatcagtgcttgaaaatggaattaatgattgtgccaaaagtacataaaatctagtgtatatagatattatatagctaaaataaatatgttagaatcattcatataaatatatatatatatgttaaattcatttttatatataagaaaactttggtccgactaatattatttggggagtatagttatggatacccgttcaaatcattttgactaaattataccaccattctagatttacgtatacgtgtgatcatgccaattctattttattgttgactaaaataaggtgtgattgtgtgaaaaaagctctttttaaacgtggtggttgtgatttgtgagctcaccaatgaaaaaagtcagctagtaattgcacttttagaataataatagttaggtttacgtcgtcaaatgcgccatacgcataaccattaaccaaaaggtttaggcttatgattatagaaataattgttataggtgtataaaaatagagtcaaaatcgaagataagcaaaatggtgccacgttaatcaacaaagatcgtaatcttttaacctgagctaattaagtagaactaactttccattaatgtatcttttgagtttttgatctcacccgcacagttggagcccaattcccttgcccttatcgttgactctactaaattttcaatttgaagtttctgcatttattctgtacgtgtaagtatcaattaattctgatgtaaacgaacatttgatagtgtgagtgccaaaattattggtgtatatttttgaaatgtaacgctttttattatattgttgttataacttatataacaatacataagcaaaattagcaccaaaaataaaaaaacagagcaagaaagttacactacaaattaataaacgagacgaactttattttatcgatttctacaatgttctaattttactatactgtagtaggaatagaaggaagatggtagaacagtttctcttctaagcaaacttccacgaaattaaagaaagacaaattttatatttgaaggaccacagacaaaacgcaaaggaccacttcataagaaacatttgaaaatagaaacaaaaacacattgcatcaggatgcttagcattgttttcgttttaatgcatgtccacgacatcccctgatcatgggaataaaatcaatgagctaaacagtaatttataataagctggtttttttttgtcgtcaacagcaattttttaacgtgagaaaaagagattagaatctttaacaaaaaaaagtattagatttagtagatgctcatgtttcctgtcccagtaaactattcttctccactgtttccaagctccatttcaaaagatttattcctcagtataaaagttaaaataatccatattttactttttttggtctataaagtccccggccaaagttttggtgcaaccattgctgaagagacaaaagatcaagtggttctgtgatcagttgtttgcataacaaaaaaaaaaaactattggtggctatttaatttgtccacttttcttacaggtacgttgatatgttttggttaagttataattatatgttagttaattaaaaatgagtctctcagtgtttagtatagtaatctcaaatttcagttcgttacaagcgttatgtagagatgactaaaaacaatatttgttaaaacataacatattaagacaagcatataaaattttataaaccatattaagattattttgataacatgtaattgtatagcataaaactacttagaaagaaagagaaacaaccaaaggagagtattaagacctgggattcccaaaataaataaataaaatccataagaagctaagtaatctccaatttcagtaacatttctaacaacagaaacaaatttgttcaaaaccacatattgatgatatgagatacaaaaaagaatgacaataaactcctacaaagttgaagcaaccgagtggtacaataatatattaacaaaaacctcaatacaaagaattgaaacctaacaacactaaatcacgggaacagtatgaacaatccatgatgaaacattcgagtggtacaatattatcttagcaacataattatatgcacttgatctaataatttagtcgtcactttttgttattattattttttctgcaagacacacattttttttttgcaatcatttctcgacgatagtgatcatatagattatagaaacttgtgaccccccccaaaaaatacagaaaagtttagaaacaatataaatatgtgctgtgaaggccaccggtggggattcaatacgatacgatccaacgaagtgaaatgagagagaaggaaagttctgtcgtttttataaggtttgatactaaaacaaagctttatgtcagttaaatttcacaccaaagtagtccgacggatgtgtcaatcaaacctgtccatcatcaaaaagacctttatgacatttgtttttatttttttttgcggaaaaaacgatatggatcatcggatcgggtctggagtagacccatgcaaaaatatagttttttttcttacaacagggtttatagatggattttggtttatgacaaaaactgcaggttctgttactatataaggtaatgaaacattttgagttgatattatacgcgactaacagattctctatgaaaataacaagaagtgcgataagtggagtggccactataaaaaatagttcctaagagtgtgtttaattagcaaatgactgaaagcaattaaaaaacaaaaattgtttactatgttgtgattgataatgagcacctagctaccatagacgtgttttacagagaaacaaaactaggtgaaaattgaaagagtgaaattgaagttgaaccgatccggttagacaactagaatcgtagtagcctagtaggtgtcggccaccgtaattgaaacaaaaagcttattaattaacaaaattaccatcatttgtttttactgtcaaaattcaaattaccatcgtctaacctgtttttgttaacaagtactaattgttgtcttcattagctaagtcataaattctaaaggttagcgtgctattttgatcatttgtgcgataatattatatatcaaaaataatcgtaaccatgtaatcgtacagttaaaaaaagtgctcttgaatcacgaagaaatctttttataatcactcgaatcgtattccttaacacatatggcaaacccttgaaatctttcttcttttatactagtacgacaaaataaaataaaaattatggtgtctttaagaaaaacttgtaaattatcataataaactatgaaaattcatattcgtgatttttttttttttttgcttttcgtcacaaatcatttttttttttttttggttttttgctgaaatatttacgatcattgccctcagactactatactacgagaccgcctcaacttggccagtctatctatttccattgtctctatctctctctctctttgaagcagtttgttacttcttacttttgtgtttcttcatattcttcagaagcaagcacaaggctagggatcgaagaagcggcgatcactgatcgtatctcactacgatcacattaatggatagaatgtgtggtttccgctcgacggaagactattcggagaaagcgacgttgatgatgccgtccgattatcagtctttgatttgttcaaccaccggagacaatcaaagactgtttggatccgacgaactcgctaccgctttgtcctcggagttgcttccgcgtattcgaaaagctgaggataatttctctcttagtgtcatcaaatccaaaatcgcttctcatcctttgtatcctcgcttactccaaacctacatcgattgccaaaaggtgatctcgctgctttcgtgttttgtcttttctttttcttgttgtgtatgattttgtgctttcaaggttaatttgattaagcgtcaggaattttacatgtattcatcgtcgtatttaaagatagttctcttacttttttttttctattccactttaaccctaagataagattggagaactagagagactgtgtttatatgtgagagtgatttttttttttttttggttattgattgacaggtgggagcgcctatggaaatagcgtgtatattggaagagattcagcgagagaaccatgtgtacaagagagatgttgctccattatcttgctttggagctgatcctgagcttgatgaattcatggtttctcactttgttcgttgccttgaactttgatcttctagtttttcttaaaatataattttgtttttttgtggtgtgattctaggaaacctactgtgatatattggttaaatacaaaaccgatcttgcgaggccgttcgacgaggctacaactttcataaacaagattgaaatgcagcttcagaacttgtgcactggtccagcgtctgctacagctctttcaggtcagcactaaagtgatatctatctcttgttcgagtgtacttttgatttcttgtttcctagctagtgtttttattgatctttgagcactatcctcggtttgtgtgtcctttaaaatccttgcgcaaatttctccttacagttacagatcttgcggattagaaaatctatcctcagataacttttcctttctgtgcttcaatgatcagtttcttggaattgatggaaaaattggaaatcttctactgttttttttttccttaaagaaaacgagaatcgataagttgttgtagctgaaactaggaggagcttagtagatccggtttagacaacccaaggcaataaaagtcagaaaaaaacaaggaaactctaaaaccctagttttgttagaaaacaatgattgattcagccacatcttttatatttggtagaagtcattcatgctttagatagatccatgaccttcacacatctttgtgacatttattttctatcattagctatggtttaagctgtggggcggatattaggggaaagccggtgggtaggattttctctgttagtgatatttattttcctagtgattttggtatggtatacttttcttttgttacttttatatatacttgtattattatcttctcctctgtcagaagaaaatatgggtctatgaaagcaaaaacttttgcgctagagattctgattttgacgtttcagtgtcgtactggaagttttttaattgcttatttccagtgaaaattcaatcatagagaaaaaacctagtcataacttccactaataaatgccactgatttttcttgagtttgtccttggcttcatgtttagatctctagtagtatcgcttgttttcatcttcattaagagactgatgggtaaaacaaaactttactagttcttgattactccaacttctcttggtgaatgaaccaaagtttatactacttttccatagaaagtgtcagacttaagttttatccatgtcactttagtttttactattagagagataaaaatttattgtgtataatgagtataacataagattgatttgttttcttagtgtatgtgaaaattaatgacactagcccttatttttgaatacattgtatttgcacctaagggtcttacatttgaagtccactgtgttcaaattacatgtacaaaatcattggtgtgattaattttcacgaacctatctgacttagtaaaccaaagaagtgtcttgatcaggtcaaatagttggattttgtgtttctttagctcgaaaaagctaaaccaaatctctgttggatttcagttaatctgagctcatgcgcatgtaagtccataaaaatgcttgatggccaagaggcttgtatattctgcatgtcgtggttaatgtgtctgttattcttgtattcttgttggaattttatgtgaataaataaatgattgaaatgcattaagacacttacacaatgtaagtgaggtttactaatttgccgaggtattaaactaaacttaatggtaccttcttttccaccatttgttttcttaattaagcagaatagaactttgtaagtattttacaagcagcccaaataaggaatagtaggtttcttaaaagaatgtaattttagttgtctttgtgttgtttttgtagcttatattggttaaacctttccaacagggcaaaaattagtttcttgttaatctacactaatctacttagccacgttcatgttgtcagaatacgtgtgtatattttttataagtaaagtatttcactatcttagggattttaaagtaatcattttacttcttcatctccacctgataagaactagctggaaaaaaattggaactacaatatagtggaattcagctttaatagtcttctttttcttatatgttgatatcaaatgctgcttcggttgtactttgttagcattgtttaattccgaaaagttgttaatacttatcagcgtacttaattaattggagtttacatagggaataatcttgtccaaaaggttgaaaaacagatcacttgcagcttgaatttatctttattggacgaatgtttagttttttaatggttttgaagtaccacttacctttttagcgtaatctcatgtatgattttgaaggaatatatattaccttatgaacatcttttccttggtcaatacctttttctgtttcttaagtcccgagaaaggactttcttttcaactgaatatcttaaactaatagtataactcataatatgtagttttcagagtcatgtgcttttggtttcttttcgtgctaatatgctttaggaataaaccaaatcctctttagtcaactgatgtttgtcatagcaattgtgtttacttatttttttcgttctcgctttagtgtgcaattgacccttttcgtgattaagatggtcaatcttggccatggtttttgttccatcctcatattttcttctaatcatttggtgttcggatggtgtattgatacaatgagatccatgtgcgattttgtatccatatgtggaatttaggactattgtttaagattattcactacagtctacaactagtatttttgtgttgtaaaatgcattcaccctaggtccctatgcattcaccctagatatatctttggctgtgaatgatattctattcattcaatgttcgtaggaaactcgaaaagcatgttcttttgaacaaaatactctgtcatggcacattagttacttcaccagttctagacatgataatactgataatctgtttggttatatcaccttcgttgatagaatggtccttttgacacgcacaaaaaaacacacccaaatgcttgaattagaaatcttttagccctttttaatttctaaatagaagaagttggagacagaagcatgaggtggtcaagtgtcacatggactcccgtggattacgttggtggatccctttatgacccaatcgcaacactctctttttaagatttgatttgattttaaagaaaaagaaagagaagaaaataggggagagacatgggttttgatttatgtacaatgcaatcatcttacgactaatgtttctccacatctttttctactgttgcttagtggttgtcatttcctctctgcgtttgttcccttaatgggccatgcaatttccacgtgtttaactttttttgggagatgtacaagtctatctactttttttttatcagtgcatgttgtctctttcgcattgtcttgatgttatataggaaccaaattcggctaataggtaaagaacaaaccgagttactattgcacataccatcctcaactagcaaagttttcatggatagggtgtgaactatattttgtgtgatttgtctaaggatcagctcattagtggtgtagcaaactacaacctaaactctttagggagactttgaaacgatgtctttctgtaatcactaagttgagaatactaagtgaaatttctattaatgcaaataatttgaccattaatcatgtttaaactcccttaattaggctcccttttagtcgcagtaacataggggtcagtatggtatggtcataaatggggcattatgagaaagttcataaatgttggggaagcgttttttccgggggtcactcaaacaagtgtcagaaaggtgatacgtgtcgtgactcaggtggctagtggtaagtcccaaaggagcacgtcagtggcaatggaagctaaactattcagtgactgcgaaagtttttgactgatcatttttgtgcccgggtcttgtaaaacctcgatattatctcgctatccttgtttttccccttttacccctttctttcacccttttttttttttttttttcctttctttcacccttgttctcttctctatgcttttttggctcttttcttcttttagctgctttagccacttagtcatttagccgagcctactagtatcttagtgttagctatgtttgttagtgttggcatagtggtagaatttgctttctacattgtcaaatatgctaccataaatagcaccaccatacattctcctagtacattttatcggtatggcacgtatttggctaatacgtgggagctaatcattattgaatcttctgtatgacattattctcatgtatgagcagatgatggtgcggtttcatctgacgaggaactgagagaagatgatgacatagcagcggatgacagccaacaaagaagcaatgaccgcgatctgaaggaccagctactacgcaaatttggtagccatatcagttcattgaaactcgagttctctaaaaagaagaagaaagggaagctaccaagagaagcaagacaagcgttgctcgattggtggaatgttcataataaatggccttaccctactgtaagtgtctttctgattccaccgtaacctagcatacactcattaatttatttcttcgacatattaatatccgcctctcgaatgtgtataggaaggcgacaaaatatctctggctgaagaaacaggtttggatcaaaaacaaatcaacaattggtttataaaccaaaggaaacgccattggaagccttcggagaacatgccgtttgatatgatggacgattctaatgaaacattctttaccgagtaatgaaaagagagacatgaaattgtgcattgtataatttttacactgtttttccaagaaaagaaaacagtaaaaagcttttggtaaatggggcatcatcgcgaatgaatggaacccgttagccaaaacggtcaagggcgtaacgagacattgtattggaaatagtggcaatattatgtcactaatcttccaatcatccaaattgatagatttcttatttgtattgaaccttacttagatagctgatgtgtcaactaaataatttattttcattatccattcgggtagaagaattcattatccattcgaattttgtgactatttggctcggtttcggagccggatttttcggatcggtttttggatttcggattttatgcccagccctacttatactacttgtatcaatgtctctaattgatcaattgttgcttgctattcaaatatctgtcttggcagttctcaagatcgtacagtaaggatgtgggaagttactgggggtggtaaagataaatgtttgaagcttgggtgggttgaagaaattgcacctagggctggaattattgagtacttcttttttgttaccaagtatgatacataagataacttacctatactatctagcttctctcagtggtttataacaagattttagtttgtgctcaacgatttgtattttgtttttcttatacacttattcaagcctcatctaccacttaaactaatttttaaaaagtattagtaaaattaacatggttttaactaaaaattattaattatttatcttaaggtttaagttttgaattggttttaaatttttagtgaaaatcattattattttttaaaaatgagttgaagtgtcaaatctatattacgtgaaaacattaccgaacttcgaacacttcaagacttacagaccaattaaggacgggatgcctaggcgcggttagttcccgacgtttttaaaatttaacacttaaactaattttaaaaaaataatagtgaaatacatggttttagttaaaagttaagaattatttatcttaaagtttaagttttaaattgtttctaaatttttagtgaaaactattattatttaattataattttactaaaaaatattttttagagaaaagaaaaaaaaataataattgaagaaaaataataccttgttggattttgtagcaaagaaagcccaatgaaaaaagcccattcgaagaccaccgtgaactcgtctgaaaagcccttagttgctgctgcgtctttgttgcaactcctccgaaattctccgtcttcttcattcgtttttgactcttctctatacttgtcgtctcctatcatcgcaattcatcttcccccgtttggtgtgttaaaccggagaaatttggagtttcgccggaatcttcctctgtctattgtataatttcctctgtctttgatcaaaagttgatcgtacttggattcccgatctcttccttctagattaggtcctggaatcgtcttcttaggtgctcctcgctttcactgcccccgatctcttccttctcaattaggtcaagaaagagaggacgtgagagaatcaattacgattctgagatgatgaactcgaggattacatggatcatcatcaagcgaacaggtatgaaaagatgggaacgatgaatgattttggtttctcgaagaagaaggacgtgagaatagagcgtattttgatttctcatgaatgaagaagaagagaatgcgtgatctaagtgtgtgtatttataaggatggtttttttttggtttattgttaatctaaccgttggggatttgatattgtagaggaaatctaaattagattcgatttccagttacgaataattatatcaatctaaccaaaaaggaagttacgttttggttgaaactttttttcgatataacgtttacaaagaatcatctttttcgctcacaaaatattatatatcaaaaggtaagagagaacatgaatgatgatcaatttaagaagttgaataatttcaactccattgctacttttattctaaatggtttctttgtatacaaaaatttgtctgttcctaacatatgttgtggtggttgctacaggtagtcttggtttgtggagcagaagccagtttctgaggacttgacaaatacaacacacgttgacatcaacctaccaatgctgctctatttgtccagagagaagcccgcctggttctgagatcccgtacaagaaagcaggagcacatagtttctaagttctgatctatgtgtccagatagaagcagcctggttctgagatcacaacaagaaagcaggagcacaaacaacaacaaagcttgagctcgagtacctaccttaaactgctgcattgaaccaccaatcttatatgtttgcaagtctggtgtggatgaggataacatttttttgaagatggcatatgttgggaaattctcagacatttcattctttgtttctgttgtcttctctcttgcaaactcgcaagtccgtttataagcttgcaaactattaaagataaatgtttgaagctatgggttggttgaagaaatcgcacctagagcttgaattattgagtactttttttttgttatcaagtatgatacataagatataacttacctatactatctagcttctctcactggtttatacacaaaattttagtttctgctcaaagatcaaagattttgtattctcttcttcttatacacttcttcaaagctcatctaccataaaaggaactttgtgagacagtggcaagagatgcacaaccagctgaatcaccatcagaaccatctcgaagttccatgactctttcatccataaacggaggattactcggcaatggcaagacctcctctttgttctttagcatatgtaataacttagacatcggtggtcttagcgaagggatctcttgagtgcacaatagccctatttgaacaactcttgctatctctttcttgatgatgtgactgtcatactgactcttccaatcgaggtttggatcatatattttctccaactctcctgactgaaaatgcttccatgccttcaataaaaaacataacaccacaattagtttgagaagtgaaacctgcagacccatagacaaaatatgtctaacttacctctgtgatcaaactgtctgagtaatctgacattttgcttttggtgttctgttttccagttacaatctctagtacaagaactccaaagctgtaaacgtctaccatctctgttagctgaccatgtgctaagtactccggagccatataacctctgcagtttcacaagtattggatcagctcaaacattcatatctttttgaagaaatggtacatttttctgaatatatacttacaaggtccctgcaatggcagtgctaatatggctcttatcgtcctggaatgatctcgccagaccaaaatcggcgattttagcttgaagctttgaatctagcagaatattacttgcttttatgtctctgtgaataattttcacagacgactgctcatgcagatacaccaatccttcagcggttccaacgatgatcgtgtatcttctctgccagtctaatgttttccctctgttcacgtctgcaaaagtaataatgaagacaggtttagtgtgctgctgcattcaagattcaacaataaaaactcatcatatagtattattagtagtagttaccaaagatgaatcgatcaaggctcttgttctgaaggtattcatagacaaggagactctctggtcctgagcagctgcaaccaagcagcctaacaaggttcttatgttcaacagtgctgatcatgttgacttcattgtagaaatcggttgctctatgtctgttgttaaagaataaccgcttcacagcgatatctcttccgtctggaagaaccccctaaacaagccagagagataccactatatcactcatttgctttacaggaaggtatagaaagagagacatgatcatacacacacataccttatagacagttccaaatccgccttgtccaagcttgttcgcgttgtcaaaagaacctgtggctttctctagtgttgagtatttgaaattcaagctactgtcttttagtgttttcgccattttctcaacatcttttgatcctgttaagcaccaaagatctcggttaaaaacactcaatccttcttaaaccaattcatcacaaatcaagaaactaatcttacctcttctcttcctctttatggtccgacgtttgcagatataaacacttactgctactccaatcatgaagacaaccacagagctaagtactgacaccacaatcactaccacagagcctgcaaaaacaattacttatgaccatcaagcgaatgagattctatagaaagcatgaatctttttattgtgttacctcttgatcttccgtttcttggtatcttattcaagaaatcttgatcagagtaccgaaggaaacatccagtgtgaagcgcacgtccttctgaccatggcaaacatcctttaaccacagaagcagaggcattctccaaacactgtttacaagaatcaggactcaaagttctccaacaattcgccaacacaaacgctgattcagattcagattcacccgcctttgcagacgcacgagcgtaccctccagtcccagaagcctcagtaacagcatttctcagcccttgtctcaccgcatcaccaaaagtcttattctttctcgtcgtgtttccacatacgatgctatcttcaggtcctttgtattcattatagaaactataattctcagctctcataaaacatccatcaagaaagattctacctccgttctgaggataacactgcggaagcatcgtccttgcttccgcgtaacagagtacacaatcgtttaaaggaagatcaccatagcactgcgcaagaccatagttagcgtctggtcctgtaccggtgagagcaactccaaaaccggaagtttgtacttgtgtgctgattttctccattgtggctacgaaatttgggacataagcggtttcgttgtgctcaagcaaaggtgagcaagtgactttaacggctctagcccttgcgtctccggtgatttgacggagtgatgaaagaagaaacatcaagagacatggaaggtacagaggaaggatatggacaggttctttcttcattttgttttgtttgattgagaaagagatctcctttttttattccctcatcaagggttttgtgttctgtttcaagttgtgaagaaagaagaagcagagagattaagaattggagatgatgaaattgaagaattttcaactgcttgactttgatgatattggtttgttagagtcaaccaaatttgctgtctttctctctctctctctactggtttagtcaaaaagttaataaaaaaaattgataatggagattgttggatttcttcttagtcttgaattcacacttggaaaccaaaccagctcgatcatgttgttgaagtcgttgtcttcattcaaatatttgtcgttttcataaacctaaaaaccagtggactaataattaatagagcttatcttatgtggagccggttcggtttaattggataaatctctttaccggtatcatgaaaaattcaattttctgattagttaaagaaaaaagaaaacgtcacatatgcgtagtgtttagtaagatgacattcaagaaaatggataaagtgacgttagactactttaaataaagaaataggtttgttgggttgattttttttttgtcaatttgttgggttgatttagtaggcctagttggtatagtacaataaaagttgtacaaataataaaaatatatataacaaaataccatttacatgttgccatggtcaaagttttattcaagatcaattgcaaagaaaaatgagaagtagttggacattcaattctaaaaatgttaaatctagttggctataataaagacatatgtagtatatgtgtttctatctagtagtctcctatggcttccttgaaagaaaacaaaaacactgataaaaagtccttgattcgaatccacttgtgcaaaaattaggagatcatgatccaaactttgcggtaataaatttagtgaatttttagtgatttgatttttttcttgtgtacatttaatatgtttcatattttgattcttaggtaaatatccttatggcattatttggttttactcgaatttctttgcatttgtggttgcatttttctatttaaatatgacatttactctttctctttttgtaaagttaaaacgagaacaaacacaaaaaccgcttactaatatacaaagctactcaaaattaacacacaaaataaaactactgaaccgtaaaccgaatcactacaatcaaaaccgaggctaaaccggaatctgtccccgtcatgtaagctctacattgttcacttcctagcttctatgacattgtcgtggcacataagtaaccctcagttcctagctaacacacgattaattggcatctcaatttttgtacatatgacacaagatgattcagaatccacacgaaaggatactgatatatctaacacgatctaaaacctcatctaggttcaaagaaactcgaaccctcggttatgtagtcactccttgatcctgaagaattagactgattcgtcgtgggagtcatcatcatctttctcatctctactacacttcctggattcagaaacggtggttgcgtcggcgtatgaatctccaaactccctttcatcattttcacaaccacagacatcgcaggccgctgatcaaacgctgcttgaacacagagaagcccaatttgaagtagccgtgacgcttctatcttgttgaagttatcacctaagattggatccactgcctcttccacattgcttgttctgtacagactccatacctaaaatatgttttcaagattcaagaaaaaggatttgatctaaaatcaagaaaatgtttgaactacttgtagagagttagtttaccgattgtaggatcgaaccagcgtcttgtacgaaggcattgttacgttttccggttataacttcaatcataagaactccaaaactataaacgtctgctttctcagttagttttcctcgtactacatattctggtgccatgtagcctctgtttccacaagtaagaatcttcagaaacaacacaagaaacggtagagagagatattaaagttacaaagataagttttgagactttacagtgtaccggcgatggcagtgctgatatgagtcttgtcctctgggaacaatctagccaatccaaaatcagcaattcttggagtaaaatcatcttccaaaaggatattactcagcttaatatctctatgtatgattctaagatttgactcctcgtgaagatacgccattccttctgctgtaccaagtataatcttgaatctctttgcccaattcaacggttgaacatcttttcttactgaaccaaaacaaagcaacaagaacaagtcaataaaagatccatcaagacatggtaactgtagtaaaaggtttaggattgacaaaaacaaaccgaaaagatagtcgtggaggctttgatttgcaatgtattcatagaccagaaggctctctggtccagttatgctgcatcccaagagcttaacaaggttcttgtggtctacttggcttattagattaacttcgttgaagaaatgatccacccattgctttgtgttgaagaacagtctctttactgcaacagtcttaccattagtaagaactccctactccacaaaaagggcaaagagttaaccaattgagaagtaggaacattccaacatgaaactctagaaaatgtataataagaacagaacttaccttatagacagagccagatcctccttgtcctaacttatttttgtcgctgaagtaatcggtagccctctcgagattctcataggagaaacagagattagatttgttcgcaagcatgaataatgaccctagttgcttcttctctacattacattacacacacacacacacaaatatctgttaagatcaagacttcactattataaccactcaaactctatgactaatcttgaaaactaagctatttctggaacataaatcttaactaattctttatggaacaaacctctttgcttcttggcgtgtctctttttaagcaagaaaccagcggcagagaccaacagaacaaaagccacaaccgaagatgtcaccgccaaaatcacacccaaatggttatgacctgatcaacaagaatgttgctaaataaatgttacaaacatatactaaatttaaatcatatttcaagcttattctacttaccaccattaccatctgatgtagaatttccagaattgttataaaacttttgagtagaaaacctcatatagcaaccagcactaagaactcgaccttcttcattaaccaaacaagaaccaatcctcactgaagctttactcaaacactcaacacaaccacttctattaagagtctcccaacactgagccagaccatgaaccgtcacgttatgtctatccacaaaaccagcatagaatccaccatttctcaccgcctccacactcatgttcttaaccaactctgcagcgttatcccgaaataccgtccggtttactccggtaatctcctttggagcacaaactgtccggtcttgcaagcttaacgtctcgttatagaaattgtagtcatcgtacctaaaacaaagatacaacaatcgattataaccaaatgcaagaatcaatcaaaccataaagttaagatttttatcggattgaaatgagtgtgagagagaaacaaacctgatgtagcaaccatctgagaagacttgaccaccacgagtacctttttggaaaggtaagcaacgaggaactttagctttgatctgagcgaaacacaagtcgcaatctttcttatcaagatcttttatacactctccgtaagcgtagacggttaagtttccggtaccgttgaccacttgtccgtaacctttagcttccactagtggagagaccgcgtccatggcggcgaggaaattggtgacgaagagacttctctgttgcggcgtcgttgttctgttgttgcatatctgagccactgtgtctcctctcgagtctgaaacagaagggcttataaacaaacccagaataagaagaagaagagtcagaatcggcatctgggtttagtggttaagcttttgaaattgaacaagaaagcatttgtgtaaggtttttgatctttgctctgttttctttttcttctctcttgaaatggattgggtgattgagaatcaagaaggagacacgatcgggaagttgaaattgaaattcttagattttggttgttgggtcaacaaaagaagaaaacttggaaaattttccagtttgagagtttttccaattgtaagagaagtcaaagagtggacttttgtcttcttacgattcaacgaaagataccgatcgcattggggtattgaaagcagaaaacgacgccgtgtgggagttatgttctgttttaatgcacggggcatcatgacgtcattgcttttgtcacttttttgtatgttctgttttgtcacccacaatgcggaacatagaaaaaacaaggatttctgttacggttatataagttatacaatcgttgggtagttgccaatttgcaattcgtatttactaggcatggaactttaaacagaatagagaatgtcgaaccagaccgagattttccgaatttcgatttagggaattgagctaagtcactaacggtaaagtctattttagtaaccgttaaccgttcagttcataataaacttgtatatttatcgattaaccattcggttcgagtgtttgaactgatcaaaaccagtaaacgataaacatataacctctaaagttcattatatctagccatcgtcggccagcctctttgtctttttcttcttacgtcgtaatagtaagaatattttactaatttgcactgtctgaaactctgaatagtccaacacaaacaaattcatgagtgatatgaaattaaaaacagattttgatcaatgcaagaatcttctaaagttcggagtaattttccggatatttcctcttttacgtttttttgtaggaatagtttgagaaaacaaggcaacgtaatggataatggcgtaagttctcgtctgccgtattgtgaaggtcgtctctaaatcaaagcaacttcaaagtcttcaattattctttttattctttctccaccacaattatccatcgacaatcttacttttatcagccattttatctgaatttgccgcatattttgacttacttgtacattctgaaaatgacagttttattcctgtcaaactaatcaaccatcactttttgaaaattacgtttttgtgaactaatgaaacagtgttttgtttcgttatttttcaatcaggcagatagatcttagaaaataattgtcttaaaaatttacataaatttgtgaaattattggtaccagataattttcggcgaattttatttagaaaaacgaaaataatagaaaccgatgggtcctcgacgtctagaagcaaagcgaccaacccgtgactatcaaagtcagcgtcaactccaaatatgaaatatccaacccatgcttattgtattactatatcattgcattaatatcttatcgcaaaaacaaaatccttacattgattgagatctatttcgaagtcatgtcattctaagattattaaactcttatcttttcagtacaagctaaaccatgttctgaagtgatagcgatgttgtgttgtatttttcttcttgttgtttattgacgaaatgatgcattttgagtctaccattaagcgacgttctaagattttttttcttcggattgacgaaacgaataatctcgagcttgttctacacgttagttaattagtttcaactttcaagatattagaatttgttggcaattatataatgatgaaagctttgacttatgtttagttgtgtgagcactggccactaatcgcaccttctccacccataaccaccactattactcttttgaattaaataattttttaatgaaacgataatcaagccactctcgtcgtgagtgtaatttgtcaaaatctttatacatcaaactagaacaataaattcatatgttagcatcaataaccccaaacgagactcatttccatagtctcatgagttagaacgaaaactactaacgaagattacttaaaactttttttttttgttcaggacaaagagaataaaacattatttgtccagcccacaagaaactggacttgacaattgctgcactagatccttctgcactatctttcttaaatggtctaaattaaaaacattgtcaacacataaaagcccaaattagtatgaattgggaataaaaataaggccattttgtaagttgattcatcggccatggcagggccattacgaagcattgtcagaaaacataaaccacaaaatgaaatggaaatttataattgcgttttttcagaacaaagcaaaaataaaaataagaaggaaataacccatcattaggcctaattaaccaaggaactaaatttgatatgtctctctaattattcaccggcgacaatttattgaaactcttttcctcaaaagaacttactaaaattacccattttttcttttagcgtatgcattattataaataacaaccaccctctatttgttcaaataatcaacaaccggtgttcaaataccacgcaattttacataaaaatgtctacaaatctccaccttgccaccgcggtgatcctcctcctcctgaccgcgagccaaagcggtgtagcaatggctcagagggttatgggaggcggacgcgatccatgctccgtgtcagatttcaaagtgttgtgcagatcagtggttaagggccaaaagaatgttaacgcagcgacggaggtttccataagagagctgatgaaaagaacgatcaaggccaaagaagccgccaagattagccggaaaagtggaggagggctcaaaacttgctactcaaactatgatagtgcactcgaaaatctacaaaaggcgttgaaaaacatcaaacaaaatgatgggtttagtcttaacatcaatcttagtgcctccttgacggactttgatacgtgcaatgacgccatgggtggtggtacggcttcgaatgtcttcgccaaatccacaagcacgttgcatgaaatggctgataattgcttggctctctctacccttgtcaaacaatgatgatgaagccaaatgtgaatattttaattcgaacaagataacaaaaaggaaaataatgaaaaaatgtttgagtttacggtagaattgttttctttttttgactcttgtgtatagtttcggaatgttttgaacattgtgtgattaagagggtttcagttggttgcttataaaacatacaaatgttctttcgtctcaccaaataaagcccaatatacttcaggcccatataaagcccaaaatagtaaatctcaggccctttttgccataagaaaagcgacagtcacatttgcaggcattaatcatcatttgcatcatgatgatgtatcagtaataatgtgtatggtccgaacaaaaatgtaataatcacgccgctttgtgaaacaccttgttcaaaaaatgatgactaatcatagtccaatgctgaatcgtataaaatataaacattcgataatcatagtcgaatgccaaatcgtacagtagaaatataaatactaagttcttagctaactccaagaaattgaaataaaatttaacctcgtggaagaaaaagctgagcatgggacggctttagacagcatcattgctcgtacatcaaattgttgtatcctccttttgcttcaatattcctctttttcttcactttttcacattctttctctgtcttcttttagttaaaaagaaagtagactataatcgaacagattaaatgctagctatatccaattttcattatttatattcgttcacacagaaatggaaatggtgtagtggaatttatgatgaagattcggccatgttgaattatacatgcctagttttctggagtatgagaacgacaatatcatgttgcaaacactttatattttgatcagggaatttttgaatctgcattgattattggagttactcagtttgtttctctaaccttctgctcaaagctgaatcgtacgtatacatttacaaagttagagccaaacattacgtcaaaaactggtaagcataaaagctagtgtgaacagataattttgtactctcggattagtgatctactaatgcaaatatgtagtgattcatttttcagttagtggtcgcaataattctccctcatgagttatgattcagagattcatatataatagtagtataatacttgctcctatgagccaccaaagctattaccctttgatgccattctttttgttgacaggaatcaaattctcccgctttatagaagaccttttattcttacacattcttcattatttgaattaatttctttaacatttcttacattttctcattttgttcgatcatacgatggatattaaactaagatagaattgttatagaccacaatagctggtatatatggatcggattcttcatactttctatgctacaagtacgtctgtatgcgtctttatgtacgtattcatgtatacgtgcacgcatgcgtatggccccaaccattaaaccctttgggatcgatacataaattttgcatccgccaaataagctgtgtttagatatgaattcacaattcagataaagatggggaaaaactttatatcctttactactttgggttaaaaaacttaaagcgagttggatctaactgtattatccaaaataaacgagaattgtcttcttgaggttaattagctattatataacgtcatgttgtgccattgtgccaaactcagtcataattttatttttctctcaatcataagttctctctggtcaactctgcttcggtattgagtataattaatcaaaagccaaatagaaaacagtatggtacaagactcaaatctcaaaagagacaaaaatctatatgcatgccatagtgatttttgaaagaaatggaagagaaaaaaaaatgagaggggaaaagctagaggagagcgatgacccattaagattaaatggactaacaaacgaaacgatcatcaatgtgtaagtgtccctacgaggaccgcacccacttaattccccaaattcaatacctattgaccctcttttcttataatgacccacttataattattatcgtatattgttgtatattgtcgttacaagattgtgaaatgttttatattttctatacacgacgaataacctggtcaagctatatatcgagattcaagtaagtatatataatcgcatgcttggttaaatcagtcctccatttcgagagacaatatgattatactttaaaaaatagagactctcgaatgtcgacaatcaaatgtcacaactcgtactatgctattgtaatgtttttcaatcaataaacttggtttgttttccacaattttatatatagttttattaaatttatatcaccggttggtgttgagcctaacaaataatatgcattattaatagtctactactactagtttgtgatatattctttttccagcttggagagaagattaagcatattttggtctctgattaaagagattacgtaccgtaacctcaagacttctataattaaaagaaaaaaatcaccatatttgtttgttagaaactccaagagattccataacaaaaacatttcattattctacaagcaacattgtgaacatggaccataaatttaacttgtacagtactctacataaacggtaaaaaacaataaagcgcttggaaaaagagagtaacaccagaaagcaaagagctttgaagaaacccaaattcaaaggtactcaatttcatctgactagctctgaccccatttcttcaaaccaaagaatgatcacaccaaatccaaaatttcccctataaattacctatctcacataaatataaagtttacttctcttacctctctttcctctttttatcatttacttcataaactttctagatatctgcaaagcccttaatttgaattcatcactaacccacatgcccaaaactttagcaacacacaaccctaataaatttttgttggagggttcgatgagttaattcattctttattgtttttgatcttctgtgttttcccttaagaaagtgattatgtgtttaataggtttgttgggagatgtgtcagtgacatcaagaagacgaacaacaattcaaaaccgtattaaatgttgtctttttgatcactcaagaagaaaacaacaagacagcagatgttttcatcattcttcacaacaagtttcgttcaagtctgatccgatgttctcctctagctttctcagattgattcttttactctgtctcgtctcttcttccttctcctccaccacttcttcctccaactccactgccgccgatcaaactctccggccgcaagaagagctccagaagctaacactgattagacaagaactcgacaaaatcaacaagccggctgtgaaaactattcaggcaatttctctattctcaaatatctcaatttgataaatgtatatatatacagacatctttgtttactttgttactctgtttcgactctgtttttgctctgtttttactctgttttgttaattaactgacatgcaagttttgttactctgttcttactctgttttttgctctgtttcttttccatgtgttatgtttgcagagctcagatggagataaaatagattgtgtttcaactcatcagcaaccagctttcgatcatcctctcttacaaggacaaaaaccattggtaaatattattttccctcctcttctccattttatctcttttcattagtattcttatcaaagatttcaaatgttcttatttaggatccgcctgagataccaaaaggatacagcgaagatgatggatcatatgaaaactcccagctttggagtttatccggtgagtcttgtccggaaggtacgattccgataagaagaacaacggaacaagacatgttaagagcaagttctgtccaaagatttggtcggaaaatcaggcgcgtgaagagagattccacaaataacggacacgaagtaagtaccattttgataaccataattaagcaaaaagtcagaggtttcttaccttttttatcctctataaagaaaaagatagagaatgataccaaaattcagctttttcgtaattctttgcacgaccattactaagttgtatcatccaaaggagtgaagcgtgacataactaaagattattctctgttcacatcgtaaaaaagattattctctgttcctttttctctttttctgtgtttacgaaaatgatactccaattttagcgtttgagaatttatttgattgattatttttgtaaaaatgacttattttgtagcatgcggtgggatatgtaaccgggagacaatattacggggcaaaagcaagtattaacgtgtggtcgccacgtgttacgagccaatacgaatttagtctttctcagatttgggttattgccggttcgttcacacacgatcttaataccattgaagccggttggcaaattagcccggagttgtacggcgatacttacccaagattctttacctattggacggtaaatgttaccttcaactttagtatccttagtttacggtaaagtttttagttttattgaattaacattttgttaacaatggtagtgatagtgattttcagtccgatgcatatcgaacaacgggttgctacaatttgctatgttccggtttcgttcaaaccaaccgtcgaatcgcgataggagctgcgatttctcctagatcttcgtataaaggtggacaattcgatataagcttattaatttggaaggtaatttttcttcttctctcatatacatatttatgcatatcatcaatgaaaaatactaacaatattttacaacatactatacctataataattcagctgtattctgcaaaaaaattaccagtcacatttcttatataatttataatcttttaagaagaatttcacatggttcacatcaatgtttcgtgggtcaaccagctcctactttagaaagtcttaaataatttgactttttttagtcataacaataacattacacatgcttgtataatctacgtataggatccgaagcacggtcactggtggctacaattcgggtcaggtgcattagtcggttattggccagcgtttttattcacgcatctaaagcaacatggaagcatggtccaattcgggggcgagattgtgaacaaccgacccggcggttcacacactacgactcaaatgggtagtggacattttgccggtgaaggttttggtaaagcatcttatttccggaatctccaaattgttgactgggacaacactcttatacccgcttcgaatctaaagattctcgcagaccatcccaattgttatgatataagaggtgggacgaatcgtgtgtggggtaactatttttactatggaggtccaggaaaaaaccctagatgtccatgaagaatcaagaaaacaaaagcagaaaaaggttattgattattattcttacatgtagtgcacatgaattttgggattaagggagattaggaatttacattgccgctaggtgttttgcaaatatcatgtagatgagttttttttctttctttaccataacaatatcaccacgagcgaacaaaatcttgtttaaaaatgatcagtataaagtttggtagtgaattatacctttttttttttggaatttgtgatggcattatgggttttgtaatgtttacattgattagtgttaccaatgtgagatggagaatcgagtgttgctatgttatgtcgtatatggttctgaagtttctttgatttcaatatagagttaaatgcagtattaaaattgtcagattcatcattcgtggaccaaaagattgattgttctatggaaaagtcatagtgtaattggttgtagcagagacctcataattaattgggaatggctgtaaaattctgacgaatattagtcacaactgtccatttattgattaataatatatgaagagttaagcaaaataaaattagaggtggtaatgtatttacgtgggaccataaattaaaatgccgatttaatggtcttcattaatcgccccacgtgccttcttttattattttcgatagaacacatttcaccagattcatataactattcgagccagttccataacattttttatttttttttgtcatccataacatttttattcccttaaaagtgtttcttaatgttaattttattatatagttctaatttgattgtaaccgagtaacagttaatccaattttcagttccagttgtttttatcattttcgtaatgcaccatgttttaatttgtgtataatctatgcactaaaatgctatttaaagaaatctcacacggttagattatacaagagaaaatcacatattcatcacatctgaagttaattttagttattaattttaaataagcataaataagctttaaaactctctaaaacctaaataatcataacattattcatacatggtgtgtaaaatgagtgttaaaaattcgttaaccaaaaatactaaaatagtgttgaacacagattatcaacatttttgttttgttttgtttatgcatgaaataatatgggcccaaaataggcctaatagttgtaagagaaaacatgagccgagactagtcaaatttacggccttggcctttttgggagaaactcagattgtattttttttttggtattttttttgggtatgtttatgcaatcatcaatcccacaattttcatttaaaatgcacaaaatatccgtttcgacaactcaaaacacattaggtttgccaaattttgatttggtttgaaaagatactaaataggttttgatttagttttggtctatatagagagagtaatccaatgtctcttccatttttgtaagacaaaactctattttagagttatatattggagcaaaatctcctccaaaatagagtttttcaaaatagagaaaatatagaaatttacattgaagatgctcttacttaaatttagtttttcttgttacgattgatttgtttatctttgataatgatttagatggtataggccacaaactacatagtttagagacagtaaaacctgaatcgatgggttaaaaaaataaaattttagctatgagaattatgatttggatttggatttgaaagtgcgaatatgatttggatttctgttaatacataaacagttttcattacaaaaaataaaaataaaaataaaaaatgacgacaagcaacaagaacaacggcgagtgaagtggaagcgtgaagcatgcaaaccgactcatcatgttctttgtcctttactctcaccgttttaactacgtaggctcgccatttggcaaacactctcggagaatctatttattacgaattatactagtaatatttttaaatgattaaggaaggacttaaaaatgaagacgacacttcgataattagcactagagtcgacaattttgaagtcaacctaattaaatactagtagctttcctcttcattcaattataggtaaggctaaataatcatatcgaacctttccacgtgaatatcacgagtcacgacccttcaaaaagacatactccttaaacagttaaaactcgtaattgtttgaaacaaatagtagatgcattttagtgttatatgcacacttttccaaatttgttttattcgcggtatcgatgtaataatggttttgttattaaaatagtaatctcgtcaataaagcaatgataaaatcatgagtatgactatttatgttaacagttaactcccattaatgaaatgaatttagaagaaatgaaaaacattgacatctcttttttgtcaaccattgtccattgacaaagcctttaaatatagttttactttcatagagataaagatattttgcatcacttaagagtttagacgcaatttctaaaattgtcaaataggtttatagttccttcagatgatcagaaatatcatattctatattgtgtatttacataactttattggtaacttttcaatatgttttgtcagtgcctcattgtactaaagttttaatatattaagacattatattgtgttcgatttatagatacgcattaattgttttgtagagagcaaaaacacaaccataagatgatttgttttgagaaaatataaaatggtgtatatatcaaaagattatcattggatgcatagtcatcattgagcgggactctttgactctttgtgcgtatatatcaatacttggtccccggaactagtatgattaattgattatggatcaacgacttgaatcgtccttacgtaaaacaatatttagttcagtttagacggatacataattggatagagcgactctcacgtccacccacttttgtttcttggaaagagtcgatcaaatttcatagttgttaatatgatttcgatggactaatatcctccatatcgagggtatgaatagagatagtgttcaaataggtccatctaggaaaatgatatgtgatgatgaagtgctatggggatggagaattaattgtttaaattgaatggcttgtgacttcatcatttcctccaatctcctacgctttccaacttggtggtctcagtactctttttattaatttaaaagaaattccactacgttgttaaatgttagtgttgatggtttttcatggaaaaatatcccaactgccgatgaattgatttatattcaaatgacacgccatcaaaacaattgtatctaataaataaagataagtcattgtaactaaacaaattttgtccacaacagtatcaattatgttagataaacaacattcaacgtttaagattttacaatggatcattcacatttcactatgcattgaggatgcgtgataggacgcatcaaactcaaaacttggtttacaagaagccaagaagtaaaaaagttgtttgaactcttaagcatttactaccctcggattttcttcattgatgttcattcaatgtataggaaagaataaaccaacgaatataaagaaagaatcctacaagatttactctcgcccactgacaataaatgaagctgattttgaaaatgaaattccgggaaaagaatcaattttgaaacagaaaatgatatttttccaaaacgttacttaaattaagtaacttaatatatattaaatagatttggtatattagttatttcaaagtataccacagctcaccggtgaatttaccggagcagaaaatgttaattcaacatttggtggttacatcactagaagagttctcgaaggttaaaagcactacacatagtatacaaacctcttcactttcttgctaaaagacattttggataaaggtttttgaccacgtcaaagatgttacataatattgaatttatacttcatctgtttcatataaaataaaattaacaaaaactaaaaaaaccaattcatatcatacagagttttaaattaataatgcacaaaaaaaacattagttggtttcttaatagttaatataataaatgattagaattttaaaaaataaattaaataatatcactttctaaaactacaattttttggttcgttttcagtaatagccaaaaatataagttgacaaattcttaggaagcattttaaaatatcggtcatcaactcttcagttaaaatttaaaatgcaggaaaagaaaactctagaatcaatcatatatatttggtgttttctaactctttggtagtttggaatttattaaacatgttcatgttttaatctatttagagatttacgaaagcgacaaataagaatttttccgcatttggtagcgagaaaaatgttgcatagtatgcgacaaaaaatgtaaaaacaaataggatctttaaaagatgagaatgtcggacaaaaagtgcgaacatcagattcaaattatcagattcaaaacaaaatacgtaaaacctgatatttattgagttattctgttgtaatttttctttttagttttgtaaaaaaatgtttttgaaataagaaaatatgtgatttaataaaatcacttgtttaaaataaaaccgagggtacattttaactcatggcaattttgttaattatgtggtaattcattaccatcttgttattctttgttaaataggtattatatattgcgtggcaactattgctatttatttgctattttgtttattattgagtaattcttttcagaaaaatgtttacataattgaccttaaaaagcaaagatttttaattttaatatatttttctccatttaaaaagcagataccagtcttttttttagggaaaaaaatatattttactaataaaatattttagtaaaatatcgctttccttctataaatacacttcgacctacactattctctaatcattaaacactatacaaacgaccaaaccaagaagaagaagatggtgaaactggagaactcgaggaaacccgaaaaaatttcgaacaagaacatccccatgtccgatttcgtggtcaatctggatcagtacgtttcttctctctcataaaaataaaccctaacggcattgcaagatcataggctcaaaaagaaatcgaaatctccgttttcactaacaaatcagatttttatatagtttttcgctatattgttgcagtggtgatccaacggcgtacgaagaatactggaggaagatgggtgacaggtgtacggtgacgatacgtggttgtgatctcatgagttacttcagcgacatgacgaacttgtgttggttccttgagccagagcttgaagatgcgatcaaggacttgcacggtgttgttggtaacgctgcgacggaggatcggtacatagtggttgggaccggttcgacgcagctttgtcaagccgccgtccacgcactctcttcactagccaggagtcaacctgtcagcgtcgtcgccgccgctcctttttactccgtaagtccccaccactaaaactcctcctcgtatctttttttcctttttaattttgttctataacatgatctccgttgacatatttttaattttgcattatataacttttgtggggattgttttttgcaactaacaacaaaaaaatcaggtaaatattgtatgtttaataattcgatataatagtagggcttgattcttgacttatgagccggttttttagctagacaagtgcagatctattctttggtgttaatattatcttaaattcaattctcaaatctactgcacattttcttccataagggaaatgattcttgaaattgatctgaataaataaactaaatcttaaataaaagaaaaacagaattttaacggttttcaaatgttgctttggatccatcttttaaaaactgcctaaccaaatgtaaacccgacaaagaagcaattattgtatttttcacttatatgggatgtcatacgttacttaaattaaagaatttatataatttgttttaccaaaaagtatcttcctctctggtataatttgctttgaagaagcttcattagaatgttaatgtatttttatctataatcgtaagtcgtttttaaaaataaagttgatttgatgtgaatcaaagattcagtgggcgttgtttctgaaaagcaagattggagatctaaaagacacagtgacagacatgtttctcgaacacaacacaacacatcgatccatcatttttttttctttttgattttaacaattttttacaaaacacttttccttcttacatactacatgtgttgtagattcatgtgcaaagacatcagtaacatgctcatgtccccacttttattcctcccattcttaataatttcattcttgagattataaaagttttattcttattttgaatatagacatatgtggaggagacgacatatgttcggtcgggtatgtacaagtgggaaggagacgcatggggtttcgacaaaaagggtccgtacatcgagctagtgacgtcacctaataaccctgacggaaccatcagagagacggtggtgaaccgtccagacgacgacgaagccaaagtgatccatgactttgcttattactggccccactacactcccatcactcgccgtcaagaccatgacatcatgctcttcactttctccaagatcacaggccacgctgggtcccgtattgggttagatatttattcaaaacatgcttttttattacaacataatacagtatataaagattcatgtatgtaaactttgttcgatgatgatgaaggtgggcattggtgaaggacaaggaggtagctaagaagatggttgagtatattattgtgaactcgattggtgtgtctaaggagtcacaggttcgaacagctaagatactcaacgttctaaaggagacttgtaagagcgagtccgagtctgagaatttcttcaagtatggtcgtgagatgatgaagaatcggtgggagaagctacgtgaagttgtgaaagagagcgatgctttcactcttcccaagtaccctgaagcattttgcaactactttggaaaatcactcgaatcttaccctggtaattaaattttactaaattatacactagctaaacgacaaatgtttttgtaacggttggatataaatgaataagacgtaacggtcgatgtgtctttaatttggatgcagcgtttgcgtggctagggacgaaggaagagacggatctggtaagtgaattgaggagacacaaggtaatgagcagagctggagagcgttgtggatctgacaagaagcatgtccgagtcagcatgcttagtcgtgaagacgttttcaatgtctttctcgagagactcgccaacatgaagctcattaaaagcattgacctttagataagcaagcgaatataacgcatataacgccttatatataaaagactttttagtttttagcttaccctaaagttatctatatataagtatgtagaactaaagaggtagaacctctctctctctatgtttatggccttttggccctatgtgaaatatgaaggtgaaactgttctagttcttagataaatgtgtcttcaacttatccaactatttgaatgaatcctattgaaaaacaaatgtgattcaaatttgtaaggaattatattaggtaactacatgaactatagtccactacacatatcccacgttgtaatggaaaagatgtaatgcatgatgtgacatacatacgttggaaataaaattgtgttaatggtttggtggtttctatctaactatgatgtaatccgttatttacagcgataaaacactatttaagaaaatagaatttcgaccaataaacattccctccatgatgtgcagaaactaatctcatacaaagatgggaggatcctcatgtttagtcgtgaatttaggttaaatttaaattagtacgaaatagaaacctccatggaatatatacttcttctaagatctatccaagtttagttcattaatttgatttaaacactcgttcacaacaatattaatcacaaaccaaatgctatcatttctataaaccccattcagatttatttaggtttgttacagatttttttttcctacttttaattattttaccatcagacttcaaaattgaaaaactttaaaagacttggaaaatgaacatgaaaagaggttgacttgcgagaggaaaaaaaaagaagaggtattttagaatacctcaaatgtgtggacgaacttatatatatatacatacatatatgatcttgtccttaatcatcttcttcttctactcttctcctctgccatgacttgaactcatgtggtggagcttagccctcaaaccaaatgagctacaagatcaggcactgtatcatcacctataaaacattaagtacctttgtttccgttcctactataagtaaagatgaaaattcttattgggccaaagaactcttaaaaggcttcctctacactcataaaaaaacaatattcaggttttatccagcccataaaaaattgaatatgaattcctctattttctaaactctacactaattttgtttgcgtccgttattaattttagatcatatgatcattaacgcttattttattacaaagtggtctaattataaatttttgtaatgaaaagtatttatatatattacattttaatcgtcatcgtcatctgtcatctgagagagaactccacaaagactcgatttttatagacggagataacagtagaagcgatttcaggcgagagacaatcaatctgatgaaagctcttctaaatcctgaatcttccttttgtctttcttcgatttcttcctcacagatcaagaggtctttacactttaacggattgagttcttcatgtctccggtttcctttaaccgattttgccggacgtttacggcggcggaagctcactggtgggttgtgtataaaggcagttttggactctgcaatgatggagcagttagggcttaaggaatcagatgttaagaatccggctttatcttctacttatcggggatcggagattccgaagccaaaccttactgttcttgatgctcaagctagggtttgtacaggtccgactcagactaggcctcttagtgaagaacaagcttttaaggtgtttgatactatattaagatcaggtaagctttttcgttctccaaatttggacttaatcgattttgatagatttcaatttgccctttttagctcgaggcctaagcattcaaaagtttcaacctttgtatccattatgctgcttaattagaatttgggatagaatgtgaaaaacccaagtggagtatgatttgcttacgcttcttggttcttggttagcaactttgtttattgatcggttcgatagagttcttagccttattagtcagtctcactgggatgcagctagaggggagctaaaagatgaagagcctgtttcaaaggcgcaacttggggctttttttgcgggaatgacaatacgtgcaaatgcatttccggaggaaactcaatggagcgaaggggaaaagcgggcgatggatgtgttttggccactcttggttagggcactacctcctgatgtgctctttattgctgatcctgaaggctctcttttgggtacgggaaattctgttggaccaacttttgttggtaatgaaactcgtgagatgagattggttggtgcgcttagagagattttggctggaggtcacttaggttatgaggaggttaagggtgttttaagagacgttcttccgcttgaaacggaaggtagtttaaactcgggagtaagcgagtcattgctttcggcgtttttgattggtcaacgtatgaacagagaaacagatcgcgagcttaaagcttactgccttgcattcgatgacgaacatggtaaaaaactcttttgatatatgatagtttcaggcaaggatacaaagttctgccttgagttaacgcatcttctactaatttcaggggctcctccagttgctgatgtcaaatccttaacccattatggcgagccttatgatgggaatactcgattctttcgaagcactttgtttgtggccgcagttagatcttgctgtggtgaatcttcattgctccatggcgtggaatggatgcctccaaaagtattactaacaaaattgaatcgttttcagtattactagtttcctagagatgactagagatgatgatgcttttgtggaatagttttagatttcttttcattaacttttcaagtcttcaggggggtgtgactgaggaacaaatgctgaagtttatgggagcaaacacacacttgtctgttcagcaggcaaaagaactcatcgaggtgcctacaataatttaaactaatgtcctacaggttttctctattttttatgtctatctttctcctgtcagcctatatctatgatttacgcgatctataaaaatgctgtttgattcttccaggacgagaaggctggatttgcatatctcagtctacgagaagctcggccatctttgtatgaaatctgagaaacatttatttgtgatatacaaatgcatacgacattttcctgttcttccataagcagtttggtggtaaagataacatctgatcgtattgacaaatttctttgacaaatttgcagatattcactaatcgaaatgagggagcatataaagaagcgccctcctctggcaacaacggagaaagttcagcaatttgtgagggtaagggatctatgaaatgtcaccgccttatatgctccacgcaaatagaatttaacaactcatgtgactaagacaagtttaagggggaaagatatcatagggcttgacagaaagtgaccgtatgcagacatttcatggactgtttttcaatgcaggcgacagggaaagaagccattgttgctgggttttaccatgaaggctacgaagagcctctcttaatgcttatgagacgaagaggtgtccattctggtttggtggttaaggttgagtctctctcttttaccatcaaatatatattaatgccctacgagctactacacacttgggacgtagacttagaacctgaattctgttggaagctctttccatatgaagttttgaacttttagtagagaaaatttcaggtctgattgtaagggaatttataaggcttcttttggtaatgcagggtgaggagggggccctttcaatgacaacacgggtgcgagctgcaagtgcatcaaaagggtttccagtcaactactgttccgggtttcgttcattgagttcggacacggctctagaagctgacggttagaatagctataataactttccttgtttcaaactagaatctactgcttgaatatatgaaccgagtccagacagggttgacacttaatttcacaggtgcaaattagtgttgtagtaaaccggattgtaggtggtaggagttcataggctaataaactattagctaatcttatatttggtcgatatggagtcatgatgtatcattttaccttggtgatggaagtcttttggtggattagcctaatctagagtgctatgaaatctaattcagattagattggtctttgtgctatctgatattaaacttatttgccttatgccttggtactagtatatgtcttgttgtacatcaatatagtttatgctcctaaaactcatggctaaactaacttctggaatcgtaggtgtatcgcgtcagagtttcaatcttgaggtggatgcgagaaactatgggtttgaaccaaccgagactccacgaactgatcgttcggtaaaacttccagaagccatttgtttcacaatgttgaggactgttagaaaaagaaaaaaaaagagaaaacttaagtcatacttttgtttaatgaacaggtgtcaaagaacatagagctggggctggcagcgcttcgtggtgagaaaggagcggcttatgatagaatcgtcctaaatgctgggattgtggaccatttgttgggaagtgaaggtgcagaggatgtagctgtggcaatggagagagcaaaggaagctattgacagtgggaaggctttaaagaaacttttgaattacatagaaatctcacgcaagataaaatagttcaaccaacctgaagagtctgaaaaatcatacacggaatagagaaaagcatacacctttctgattcttattgatttcgttttgtgtaatatgtttttgaaacttgaaagtgtttttttacagaattggacacacaacacaatgtggatgtctagtgaatcacgtgtacagagtctgagaacaaaacttggttatttctaatgtgtttaatgtttcttaatcattttgcacattcatgttacttaattagtttagtcccgtcaaagattctgatggagacattcgagccactctttctcttgaggataatgggaaacaaacaagcgagtcaatgtccggaaaatgacattgaagccgaaggcaagggacgtgggacgattttataggttgtgttgcagaaaaaacagagtccatatcaattctctcactcgttttttttaatccgttttgtagcaaaaagctagaaatgacttttggttataaaatctttctttttgccgattcaagtggctcagctgcttcgtctttttgtgttctccttatgccacatgatctgatcagacgagtgtccaaattcacgtcagacacacaattgtaatctaccgaagattttattttaatatcatataaaacgctattgcaataagcgcccacacaagtctttcttacttgccctgctctggaacgtgactttggaggtaacgaaactgtgtcgtgagttgatctaaggttggtataatttcttgtagttttgtccgatttcgaaaacccatttcaaaaggcgtcgcctttacttttatatcgtttgagactgttctgtagattttgagttgtggggttcactctctacgtgggttggtgatgatttttttttagctctgttcactgttgttttattggaataagttgatggtacgttctgtagttatagattcgataaaaaaccaatctttatgatcgactcaataagtcaaatcttgttgtgttaagtgaaatctatagtagtgaaagggtctccacttagctgtttggttagtcttgttataagctcgattatgtcctttcttgtgatcagtgtattaatacatctgcttattttggttgtagaggggaagtgaggaatcattttgcttttagctttgaaaagtaaatcctggaaatgtctctcaaggcgttagactacgagtccttgaatgaaaacgtgaagaattgtcagtatgcagtcagaggtgaactttatcttcgtgcttctgagcttcagaaagaaggcaaaaaggtaacaactttgttatgcgtttgcagttatgagcttcattagctgttgagatatgggaagcgtctttggtttcctaactttcacaattacagattattttcacaaatgttggaaaccctcatgctttaggacagaaacctctgacttttcctcgtcaggtataatatgcaattctcatgttttttgccaagctatagatttaagcctaaacatattgaaaaccaatgcaggtggtttctttatgccaagcaccatttctgttagatgatccaaatgttggtatgatattcccagcagatgctattgcaagagctaagcattatctttccttgacttctggtggtcttggtatgtcttttattagagaactcagatcatggttaatattggcttaggtttgtacaaataacatgaaagtttttgctttacttttaaccaggtgcttacagtgactcaagaggtcttccgggagttcggaaagaagtcgctgagttcattgaacggcgtgatggatatccaaggtgattgcttcatgttgattgtttatgcaatgaaataatagatttgttgtaaagaaaaactactctgaggccttttggttcttatcttcaaattacagcgatccagaactcatatttctaactgatggagcgagcaaaggtgtgatgcaaatcttgaattgtgtcatacgcggtcagaaagacggagtaatgaaccttaactcgcttgttcctttatctaaagtttttgtacatggatatatgagccatttcatttggttttatcataaatcggttcatatcaatttggcattaaagcaggccctagtaagatatgggttgtatgttataatccctcatcaactgtatgtgggatttttttgatggctaagagttcagattcagatttcttgcagatggtataggttttttaggcttggtttatagtagcatctggtcacaagttttcttggttggcagattctggttccagttccacagtatccactctactcggctactatatctctgttaggtggtactcttgttccttactatcttgaagagtctgaaaactggggacttgatgttaacaaccttcgccaatctgttgctcaagctcgctctcaaggaataacagttaatactcttccactatttttctcgaaactgttgatgcagaggcttttttatgacatctttacctctgctcttatttttgtttttttcacatatggtaaatgcaggtaagggcaatggtgattattaaccccggaaacccaactggccagtgtcttagcgaagctaacataagagagatactacggttctgttgtgatgagagattagttcttctcggagacgaagtgtatcagcaaaatatataccaagatgaacgtccctttatcagttccaagaaggtaacaacgatgtctttcattggtatctttaactccttagcttcaattatattagcctatgcatgtgctttgtgatcattggtctgcgtgatagtccttcattttatcatgaatgttgcaaaggttttgatggatatgggagcaccgatcagcaaggaagttcagctcatatctttccacaccgtttccaaaggatactggggcgaatgtgggcaacggggaggttactttgagatgacaaatatccctcccagggtttgtacctgaccgtctctttttcacccgtgattttggtaattgcaagagcctttttaatttctggtaatgcagaccgttgaggagatatacaaggtggcctctatagctctcagccccaacgtctctgcgcagatatttgtaagctagcccttcttagtttcttagcaagttctggttactgaatgatctcactgctgaaacctgattgtttttgtgtagatgggtttaatggttagcccaccaaagcctggagacatttcatatgaccaattcgttcgtgagaggtatatatagtcattctactctaaataaacacgctttgatgaatgaaggatcacgatcatcgaacttcactggaacattattaacagcaagggaatactagaatcactgagaagaagagcaaggatgatgactgatggattcaacagctgcaaaaacgtcgtctgtaatttcacagaaggtgctatgtattcattccctcaaataaagttgccgtcgaaagcaatccaagcagcaaaacaagccggaaaagtccctgacgttttctactgccttaagctcttagaagccacaggaatctccacagttccaggctctggatttggacaaaaagaagggtagaaaaaaaccctctgtgttttacagtttcatgttattcttgcagcaagctcatttttgtttgtctgtttgtttcagggtgtttcatttaaggacaacaattctgccagcagaagaagaaatgccagagattatggacagtttcaaaaagttcaatgatgagtttatgtctcagtacgctgataactttggttactccagaatgtgaaaaagaaaggacttagagtcagagtcagagatcacttcttcttctttcacgacattattattgtctattcacactcttaaaaagcaataagtactggtcctactctgtgtcaaactcttcttggtgctcttaaaacctttgtatctattgttaccaatttgtgtgactcacacacacacacacacaaatctctaatgttcaattatatggtaaatggtttatttaattattaggtggacaacattatcatattataaaacttaggaataaggaattaaggatcataagaatgatttattatatacgataatattttgcatccaatagaattccttcctttaatataaactttctccgccgtcaatatttacatttttttttaaagtaagaaatataattaaataaagtatagcacttatccaatcatgattaaataaaattgtagccgagtataaaaatttccaaacctcttttcttctttgactcctccttttggagtttcttcagcttcaatcacagagaataagagaaagccctaaactcaaatcttctcttctttttttcttttccgagaaaaagttttgggagtttttacttattacccgagaagaaacacaagaaaacaacctttcccgcctaaaagtttctttctttttttcctctttaagagaaaatttaacaatttcttatatatagaatcagttgaatattcaacaaccatcttcgtttaggtcttcttgttgaatttcttgaatcaaagtcatggattttcctgaaaagtcgcttaaagtgaggatcccggtgaaagctccggtgagttctaagccagagaaagaagaacaacaagaaaagaaagaggaagaagaagatagattcacaactccaaagggggaggaatttagaattccgccgctatttgagtgtcctctggcaccggagccacgcatcttcaagaaaaaaatcgaaaaacgtcgccaaaaagccgtcgggcaaaggaatatatcctttaacgttcaagatttagatactttcttcgcaagaacacaaaacgttgcagatgattcttgatacatatttaggtttatagttagttagttaattccttattaactgaataatttgcaggagtttttattcaatttttattttaactatcatcttaacataggatattatcttccctttttagtatagttttgggtagaattagtattaatatcgaccaatgatgaagaagaactaactcatattgttttgaatatttttctttgatagtttttttgatggatcatgtgtgatattattaaatttggttcttaacactttaaatcaaataaattcgtattggtaatttaataagtgatatatatatatatatatatgtatatcttttattcgtacaagatgtttgcaaaccagatttgggttaatgagtggatcaagcttgatacaggatatatatacttgcatcaaactatagagttactttaagattaaatcgtactatgaatgttcttgctaaatctatgattcataacaaaagtcaagaataaatttcataattagtgaatggacaaatcttagcttaagtcattttattcttcatactttggtcagctactggatagaaaacatttgaacccattctatgttttttttctccagtgaaacaagtcttagattgtgaccagattaacatttgtggaaaaatcaaacttggaaaagttgacccacacggccacacaacaaaccactgtccactgagtctaaatagagaggtcaatatcgtgtttggtaatggtaagaaaattgaataggccgcgtcaagctgaatggaatcctatgcaattacaaatttataacgtcaccagtttcatactcttgtttcacgggagatttatatctgttcttgactttttttttggagattttcaagtaatattttccagagaagtaatagtatcatacaagtaaaagagtcaaattctcaatttttgacaatatgaaactttagacaatcacattttctttaatagcaaaaacttcatatccaaattaattactcatagcaacaacaaaatagtgaaaaaacatcaccatcatccataattaacgacacaataggatctccgtcaccgccatctcagtacactgacaaaaaactcaggctatatgcattgtttactggtccatgatttttgtagactaatttccacatattatatgaaaatgatttttgtccaaatgattttaaataaggtacacagaagattgcaggcccagcccaaaaactaatattaatgcttcgtgtttattagcttggttcactcatcatcctatacaaaatttcttggcggtttaagtattccacgtgtcacagtgtagtctcgttgattaactgtctcatatcacatagccgtccgatcttcataaccacataactaaaaaacaaaaaggaaaaataaattactcggcacatacgcggaaaaaaaaaaaaaaagcgaatcgtttacttacccctctttgaaaccgacggtggtatttttcgccggagaagatgaagcagagaacctggccttgtagatctgaaggatctcgattctcctccttatcgtttttgaaacctcacgacaaggataaacggagtagaatttcatcaatcaacaaagcaacggcgaagtcaaccacaagttcaaggtcttcttcttcctcttcttcttcacgtcctccatcgaatgagttcggagatttctcgatgcttccgtatgatatactgatgaagattgctgcaccgtttagtcatccgaatcttcaagcggcgtctttggtatgtaaatcgtggagagacgcgctaaagccgttgcgagagtcgatgttgttgattcggtgggggaaaaagtacaagcacggaagaggaggtgtgcgagcgaatctcgacaaagctcttgattcgtttctgaaaggagctatgcgtggatccacgctcgctatggtcgacgctgggcttgtgtattgggaaagaggagagaaggagaaagcggtgaatttgtatcggagagcttcggagcttggtgatgctgttggtcaatgtaatttagggattgcttatcttcaaggtaaaacctaagttctctcattgatgtgattggatttttattcttaacctgattaatgtttttctggattgtgttggtttatagagaaattggatttgacttgatggatgagtttattgctgatgaatttgtggagcctttttctgagcaatttgattgcttctatctgcagttcaaccttcaaatcccaaggaagcgatgaaatggttgaaacaatctgcagagaatggttatgttcgagcacagtatcagttagctctttgtttacaccatggtcgggtcgtgcaaaccaatctgcttgaagctgtatgtgccttcttctgattcttttcttcatgcttctagttgagattctatattgttttcatgaggtgaagctgttatctagattgaaagtagtatctagtcgtttatactaatggctgcactcttggtggaaactgataatcctatgtatagacatgtgcttagttcgtttgtggaaactgatactgctatgtttggatgggttattggttcatttgtggaagctgataatgctatgtttggacatgtgcttagttcatttgtggaaatgtgcggtttctgtttttcatctttctagaatcagtaaagtttgtatcgatatgatgattggattttttttctctttttcgacagactaaatggtacctaaaggcagcagaaggtgggtatgtacgagcgatgtataacatttcgctttgttattcggttggagaaggcttaccacaaaaccgcaagctagcaagaaaatggatgaaacgagcagctgatcacggccacagtaaagctcagtttgaacacggccttgctctattttctgtaagcacctcaactcaactactgcttctgagagtctacttctcttagtagtaatagggataacttatcgacttatgtatatccagaaacaaacatattacgcaatgagttcattcgattttaggttatgagaaggtttggatatgtaagtaatgaatgtaatgggttgatgcaggaaggggagatgctgaagtcagtgctttacttagaacttgccgaacgtggtggcgaagcagctgctactcccgtcaaagaagttgtacaccaacagctttctgcaacttttggtggtcaggccgtacaccatgccatacaccaagccaataactggcgtcctctaccagttactcgatgactcctatcatttatttcagtgaggtctagtgattggctagttacatgtccataacttaaattccaatttgacaatgtatcaatgacaaaaccttatttcagatttctacttttagttcgtactcatgttttaatccaaatggtgcgactgataaatttgtatccacacaataccaccaaaattgtaaatccgcgtttgcagtaggataataaatattacagattgtttcgattttggttttcttttgtgggtttgaaatgttccatggtgtagtgtacaagtaatgatgatttgaaaacacaaactttatatgaataacatgtaaaccaagcttatcccaaacatatgcgatatgataaatatcatacggtatatcatttctcatagcacgacactgagcgtaccatttgaaaaattcaacgatttcttcagatcttgcttgaaaataaagtttgaatctcaaaactccgttcaaaatagaagaatatcaaaaacacgatggatacagtataatatccaaacacattattttttcgtccaaatctatgtgactatgttgactccgttcaaatctatgtgacaatctgtactattgggaaatttgaaatgcatttccgcatatttacgtaaatacattactaagcaaaatcacattctagctgtttcaacgttacatataactaatcaaatgcaacaacaccttctcactttgatgacaatcgaacatccaattaaaaattcaacaagaacaatgcatatgtatggtagaaacaatcacaacgagttaaaaggatcgtaacgaatgaatcatgacagacaattaaaccagcatacgcaattataagtctgaattcggaataccaaacatttatcaaaatccaacaaaaggttcataaaactactaactttaaagagatctcgctctttccaaaatccaaaagacaacaaaagatgataaaactccatagaagattcaaaaacagagttaagcaaataaattcacctaacttaagcagtaagcacaacagcaccaccagcttccttaatcttcttctcagcagtcttcgaaataagcttcgccttcacaacgaacggcttgttctcaggcaaatgacctttacccaaaaccttgaagaaaccatgttgagtcacatcgatcaacggaacattgtccttggttgatttcgccttcacatcttcagggacgagtgaccaaagcttgtcgaggttaacgattgggcagaagaacttgttcctcagcttgtggaaatacctcataccaactttaccgaagtaacctggatggtacttgtcgaagaggatcctgtggtgatgcatacctccagcgttaccacgacctccgggatgcttacggtgcttaccgatacgtccatgtccggcgctgacgtgacctctcttcttcctgttcttcttgaatctggttgtcattttcgccgatctgctacactctcctccctccctttctctctttgcggctagggtttcttaagatatcactgagtttataaagacgataaggatttttacgtttcctattttaccctctagggtttacgacattttgggctatttagttataacgcgagatgggcctttaggcccgattatatcgtagagggggaagagagatcatctaccacaaccacatgattgaaccttcacgcgcctttctgacgcgccggtgttgttgttgttaccatgtggttcatgccttcggtggtggatctccgtgggttccacctcggtttattttggttgacacgattcttccttacgtgacgtctttcttcttcaatttcgaaacgacgcgttttaattcttcttctgcatttcatatgaaccaaggaaaaagcttgaagcgtcgtgactcgtgaagcttcttcatctttagtccaccgaacataaatggctcagcaagtactcggctgcacgagccgccccatccgcgtttctcttcaccggtgttctgttattaccaccagtgacactatcagaaggaagaatctccgattcgttagaaacccgagattgtcgttttctcttcaatcttcaactagaaattatcgtctgccttcgattaattgctcgacggtgaatggagcagtagcggaaactgcggaatattacgaaggagaaggagataacgtttcacttgctgagaaaatccggcaatgtattgatttcctccggacgattttaccaggtggaagctggtggagtttctccgatgaagttgatggtaggttcattgctaagcctgtgactgtttggcgtgcgttaagtcggatgtgggaacttgtggctgaggatcgttgggttatcttcgctgcgttttccactcttatagtagccgcggtgcgtggttcttccttggttatgtatttgtagaagtattctgaatctctacttagaaattcttagttctaatgaggaatcagaatcgtccttttcttatacattttgtttacttgtttacagctttcagagataactattccgcattttttaacagcttcgatcttctcggcacaaagtggtgatatcgctgtgtttcatcgaaatgtcaagctcttggttacgttatgtgttacttcaggcatttgcaggtcaagatcttgtatgatcaaacacttgtctctggttttatttggtttcaagttgaattagagagttactcttgctgtctaaccaacttgttgtttttgagattcttttataaaaggatttccatctgactctttgttcaactcataatttcagtggcatacgaggatgcttctttgggattgctaacatgatacttgtgagttcctttttattttctgcttaaatctactcagtagtcttaccttctcagaacatgatatgatgggatctcaccctactctgtaggtgaaacgaatgagggaaacactatactccactcttctcttccaggtcctgaaagtttctagctgttttgaatcttggtagctcatgtttacctttaatatctttttagctactttcgttaacttggctggattttgcatcaggatatatcatttttcgactctcaaactgttggtgacttaacaagcagacttggctcagactgtcagcaagtctcgagggtcatcggaaatgatctgaacatgatatttcgcaatgttcttcaggtcctctgctacaatataatttccatctcgcctgaagtgtgttttttgcatggttgacttctgaatgtatgtttaccttctttcttttagggtacaggggcattgatttatttgctaattttgtcttggccccttgggctgtgcacattggtgatatgctgtattttggctgcggttatgttcgtttatgggatgtgagattctaccaaaacttgtctcacttttattaagaatactaatctgtgaagatataattgattatacacctggcagctgaaactgatacttaagccatctggtcatgttgtaggtaccaaaagaagacagcgaagctaattcaggagatcacagcttctgcaaatgaagtagattgctcaaaaacgcttatcgtaacttgtcttatatgcaatgaattctttcgttaataactgctctgtgatcttcaaggtcgctcaagagacatactctttgatgagaaccgttcgtgtatatgggacagagaagcaagagtttaaaaggtgcgatctgtttccatgaaaaccattgacagtctcttttttctttatttatcttgtgaaaattttgcaatatcggccctatctgtttcaagactatttttggcagccaagttactttttgacatggattttcttcccttctgtggtggaaaggtacaatcactggcttcagagattggcggatataagtttgagacagagtgctgcatatggtatttggaactggagcttcaacactctataccatgcaactcaggtttctcaaatataacccctgttttgctttatttctctcttttgactgtttgtgggaaggatcaattaattttgtggttcttaaagatggtgatgctcatgctaagaatgtgacaagatccatcattcttttcttctcttatagattattgctgtcctggttggaggattgtctatcttagctggtcaaataacagcagagcagctgacaaagtttctgttgtatagtgagtggttaatctatgctacatggtgggtgggagataatttatcatctttgatgcaatcggttggagcaagtgaaaaggttttccaaatgatggatctcaagccaagtgatcaattcatatcaaaaggcaaggttcaaatttttggctaagagcactctgtcttagaaacatgttgaccatttatgagattgatgagagagtgagttaggttgttatcagtagatattactcttactatcaaaccccttccaggatgaaccacttaagagtatatgactttggacttcctacctggaggcttatagtgattgctacgctctaccatgtaatgtatttttatttatatactgttctgtaggaacgagactgcagagactgacaggacatatcgagtttgtagatgtgtcatttagctacccttcaagagatgaggtatgactgtaccgagtggaatctattttctgataatttttttgcttttgtgtgaatgtccttgaaccacagttttttgcttccaacgttttacaattgtgtgaatgtccttgaaccacagttttttgcttccaacgttttacaattgtgtgaatgtccttgaaccacagttttttgcttccaacgttttacaattgtgtgaatgttgcaaattaatggccaaatatatggttttgcatttgcatcattttacatttttgttgagtatattagaatttatgcacacacatcataaagagttttccagtcatgtttatagtatggggcactggggctcatatatcagtttttcataacaattatatcatatgtcaatctctcaggtagcggtggttcaaaacgtaaacatttccgtgcatcctggtgaagtggtagcaatcgtaagtaaatctcaaagtagttcaacaatgcaactgttttccttagaatttagcggaagtgatatgtgtgcttatttgttttgtttaggttggtctaagtggcagtggcaaaagtacactggttaatcttttgctgcaactctacgaaccaacaagtggtcaggtactgtaggttactcaaactcactgtagaataaccctttaaagtcttccttcttaatagctggctttttgaattccagattctactagatggggttcctttgaaagagttggatgtcaagtggcttaggcaaagaatcggatacgtggggcaggttctcctcgcttttcgtctttgtagaacaaataaactttgatgaatttcactatccctttctaaagctgtcacaatgaaacaggaaccaaagctcttccgcacagacatcagttcgaacatcaagtacggatgtgatcgtaatatatcgcaagaagatataatatcggctgcaaagcaagcctatgcacatgactttatcacagcacttccgaatggttacaacacaattgttgatgatgatctactcagtggagggcagaaacaacggattgccattgctcgtgccatccttagagatcctagaatcctcatcctcgatgaagccacaagtgcactcgatgcagagagcgaacacaatgttaaggtaacctctctattaccaaaaagacaaattacttggatgcaagaattcttaagccttttgtttttccagggcgtacttcgttctatcggaaacgactcagcaacaaagagaagcgtcatagtgatagcacacaggtatctttttcttgcactgatccaatcttttacatgttttgatcattgatttataacattctgttccttcacagactttctacaattcaagctgcggatagaatagtggctatggacagtggacgagtcgtcgaggtaagccactatcttacggttttgataaatacatagaaaccattgatggctttgattttgactgttatatttgtacacaaaacagatgggcagtcacaaagaacttttgagcaaagatggcttatacgcgagattgacgaagagacaaaacgatgccgtcttatgattgatcctacacatgctaaactgttcatgaaatagtcatgattatgtttttgaatggtcatgacgatatgtaatggcaaaattatgtaaagtgtaaccatagagaattcttattatttcacacaaatcgtgtcgttctagtatagttgacataaactgcctgccgtttctatatttcctgttaaagcacgaaaatttatagaaagtggaaaccactgaagacgacctgtagtttatcaattcgagaacaagcaagcaagcgatctcaaacgcaagagtcaaggactcaagaccttgctgctaatggacgcgtaccagccaccacctcaatacctgagaccgccgtctggaccaccgcctccgacggatccttaccaccaatactatcagcatcaggcgagaccaccggtgcctcctcctacgcagcccggtggtcctcctgcatggtactccaaccaatttcatcaccctcactctccatcgccaccgcctccacctccgccgcagtgggggccaccttcaccgcattatcctcaaggccaaccttactcttctcccgcttatcctcctcaccagccgccattcaacgccggcgctaacggtaacagtcagtttcctcctccatctaccggtgcgccgattcctccgccatatcctcaggctaatcaggttactccgtcgttggattgtcctgtgtatttcccctttgtcgaactgttatttgatttggttttgcattattaggaatggggcaatccaaattgggggtatcaacaacaacaaggtcacacccctcaaggtttgctttctctcatcgccatctatgttattatggatttggtttctgactatctcgtgatcgcagctaatagcaacgtcgaggactgggctgtgaaagccaaagaatgggcagctgcgaacaaggatcagcaatcacagcagtctgcaccgaaccaacctagcggacaagtctaccagcagcagtatcctactcatggctatcaagattttcatcaacaggcagttccaggagtaagctatcagcagcatcagcagtttccagttccacccacaacacagcccgagagatatccaaattacgcaacaggaaacgagagctttcctggagttggattgccccaagaaaacctgcctaccagttctgcaattcatcagcaggaggtaccttatagttattcttctgtagcaggtaaccatttacttagaacatagctcctagtcaagcactctatgtgggtttctttgtaactcgaaattccgcgggtgtcttcggttcatgataaatcatgtgcataatgatgtgctgtggctcgccagattaacccatagatcctacgagtagattagccattactaatcatagttcttcttgcattttgctccctgatcagtgtgcctatgtttcccaattctgttggtctagagattggtaactcataagctctgtacaccttcagaacttaaacttgttactctgtttgcacgtaaagaagagtctggaaatacaacacaacatgaggtgcatatatcattgcctgatggtgggggacctgttcacacggagcagcatatgcaatatgcatatggagatcaatcagctgctccacctagtaactttagtgatcacaatgcatggcagccccataccacaagtggagtagtctatcctccaattccttcatcggcgcaatcaatacctcaggtactctaaagttgtttggttatcttttgtttctgtattagtttggtggaggcaagtttgatgtttactctctttgcagcatgactcatctatggccatacctcctgtttcgggtcatatcatgcccccatatggaaggtttcccccaccaaatccccagcctgttggacccccatatgcttttgggacaaagccccctcttcaccctgttgcagcattcatggatgactcatatgcagcatcgtctgttcctcctaaaaaggtaagatttttttttttctgaaggagttctgtatcttccatgaattctggctgataatgtgatttccaggctcctgtacctaactggctcaaggaagaattattgaagaaaaaagcagatcttggaaggccttcttcagggagatttgaggagagagaatctatggatgatgatgtactttataaacctcctacgaaagctgatcagcctgacaaaaaaagcttcagcccctctaattcctctgacgaagaagaagaggttccttgaacttttaacacttgttttgttttgacgattcaagcgctcttggtacttaaatttgatccagtaacatcactaaaatgcatggtttgcttcatataggatgagatggatgcagctagaaccacagaaattaatatggagataaagcgtatcttgacagaagtccttcttaaggtatgtggcctggtagaacttgagtggctggtctataaacatgtttctgctacagttgacatatgtcttttgaacaggttacagatgaattatttgatgaaattgcaaccaaagtcattaacgaagatgaagcaatacctaaaggtttgttgtggtctccaagatttagttttatgtctttaatatgtggaataactcctgaatgttaccttcttctgtactgttatgctgtgctattcatggttcagatgatagtgtacagcataatcataaattgtcatcatcccttctctccacagctgatccactccacaaggcttcggcaaagattttggtctcggtagaaggtgcaaatacaaaagctagttctggctctccagcagatgtgctaggtcttgctagctatgcctctgatgatgatgatgctgatactgatgctgcttctgacgcgaatgctgatgaaaatggagtggagagtcttggtgtggggtcaagacacaatgttagtcagcagccaagcactgagaaacttcctgaccctgaagcaatggccagtgcgaaattggatccagcagttggagtcaatgctaattctggcaagaatagtaagtcaggcttggaggattattctcagatgccaggctccacgagaaaagatgatgaggcgggtagtaccaaaatatctgatgtaagcgccagctctggacttgatgatgatacttcaggaagcagaaaagagcatcctgacagaactgatagtgataaagatgccatactagatgaacctcacgtgaagaattctggcgtgaaatcagattgcaaccttcgtcaggatagtaataaaccttatgggaaagatttgagtgacgaagtgagtacagatagaagtagaatagttgaaacgaaaggtgggaaagagaaaggagattctcagaatgactcaaaagatagaatgaaggaaaatgacttaaagtcagcagagaaagttaaaggcgttgaatcaaataaaaaatctactgatccccatgtaaagaaagactcaagggatgtagagaggcctcacagaactaattctaaggaagaccggggtaaaagaaaagagaaggaaaaggaagaagaaaggtcaagacacaggcgggctgaaaactcgagcaaggacaaaagaagacgttctccaaccagtaatgaatcttctgatgattcgaagaggtggcattcgatgttctacttttagtttgtctgttcgcttttttttgtctaatgctttttctcaatgctcacaatggttctcctattacctttctccaggaagtcccgttctagaagaaggagtgtatcaccatctcctgtgaggtccagaagaaaacgctcttctccatccagtgatgaatcctctgatgattcaaaaaggtgacgatagagtgttctgcttttaaattttttcttttgcgtttcttttgtctaatgctaacgaactatttgtctttcttcaggaagtcatcttcaaaaagaaagaatcggtcaccatcacccggaaagtccagaagaaggtagctttctaaacctattagcattatgagatcactggtgtttcttctatatgtttgttagtctatattagcactagactctgtgaagttaaagaactattgaaagcaaaaagtttgacaaaaagacaatgggtaagccaagcggagtagctagtaagaaaactcaccacaaaaagtatcatatatgttttgattgtatagacatgtttcttcgcggtcaccacatagcaagcattctcagcacaagaacactctctactcttctcatgacaaatccaggtatgtagtctgtttcttctgtcttaacaggtggataaagctggattaaaaaagcaaaagagtgttctatatctcctcctgtttattcaatggaactcaaacctgatttgctatacaggtcgaagcggtcaaggtccagatcaagatccccccacaggcgccatcgtaaatgaacactctagcaaactggtctgagactgtacccgggacaatattgtgcgcggtggatcacaggattgggttaatgtactggacggacatcgatataatcaaaaactataaagtcaccggtttgtgagcgaaatagtgcatagtaaaccgctctttccttagttcttcagaagaaatatccaaagatttttgactgacttgtttgacaatatcgttggttggttaagcgttcctatgtaaaattttgttccctctgaaacattgcattatctaaatctatgtctttacattccacattctaatgaaatcgcattaactaaagttattttatatttttaaactaattaagataagagttgtgttgtgtgtcccaaaaaatgtctgaagtcaaaaatgtcttaattgtttggcgaattgcactaaaaataagaaccctaaaaagtcttactttagtgtgggacaagaagagatgttaaaatctgaaaacaatttcttgaagatgacgaaaagtgttcacatgtcttcttcttcttcttcttcttcttcttcaccattcctcccgccggctttccgcttcatcaccattttgaagttttggtatttctccattttcttcctttttccgttaaagctccatttttttaatttttgtctttattttctgaactttcttctcctcattcaacaattcttctttcgatttcccatgaagcttaaggttccattctcaacttgtttcgagatcttgtgtttcaattttctgaaaagtttttgactttgttgatgactcaatcttacagggtcttcgagctgggctcttgtctatttggctatctgggtttcttctaatcgctctctctttctacggcactcagcttctatctccaacttcactcaatgacccatttagatactctggcgattccattgctactgctgctccaagaatcaccattttcacttctctcaatgtctcctccttggaagaaaatagccaagctttacttgctcttcgttcatggctcgctttgtcttcccaaatcactgttgttttattcactcaacacaacaacaacaacaacaacaacaacaacaaccactcttctgattcttcttcattcaccgacaaatttggttctcgtcttcttcttgattccaccattgatttcacgtaaggctcttctattcccactccatttgtttctatattaactctagttctctgacttgtcatgttctgttgctgattctggtttcacttgttggcttttaagtgtgattattagaagggaagatttcgtcattgtgacatcttggtttttgttttacctgttaggtttcttggaactccatttttacattcgatgatgtcgagaattgaagcttatcaatcagatatagctgttctaatggatccagagactgttttactgccagatttcatatctgctttgagttatgctcacgagcttggtcgtgattggcttcttgtttcttcatcagtggaaattccccgtttcccgttccattgggatgaaactagacatttttggcgtcaggacaatgggaaaagagtgagatttagggaggtatggaggaggaaacttatgtttttattgataatgatccgatctgatccttcccctaatcaaattttgatcgcgttgttcttcgtgtcaacagttgcagaagatgataagcttgcggagtttgcaatcaaattctagcgcaagcaaaatgattatggcatggaacaacattgatatgcccttgcactgtggagtgcttccaccttttttgtatcaaagaggtactcataatcaatggatcattaacgaagctatgtcatgtaaaagaaggtttgtgtttgatgccacttcaaccatatcgagctttttcctaggcaatgcagagaacatatacaataggagtgataatgtctcagaacccaaaacgagaaactgggaatatgtaggaaactcccatcttgggcagctctatggttcattgtactctaggtcttatacgctacctaagcttttgaagtgcaacagacgctatatctttgttagcgcttcagagcgttccactgatctgtctataccaaaaggaaagagtttaggatttcggacacgagagaagatctcagcttgtatcactagaactaaatcgcggagcttgaaattagattttgtgcagaaagatgagacagtgccaccattgaagtttccttttgacctggagtctcttctcccattagttgcagacaaaaacagaactgttgttctttcagttgctgggtatagctataaggacatgctgatgagttgggtctgcagattacgccgcctcaaagttccaaatttcttagtttgtgcccttgatgatgaaacttatcagttttctattttgcaggtaaaaaaaatgtcttttgcttctctttcttgctacgttgaacgatcataggtcattagagagtttataatcagttggtcttatgcagggtctgccagttttctttgatccatacgctccaaagaacataagcttcaatgactgccactttggatcaaagtgtttccagagagtgaccaaagtcaagtcaagaacagttttgaagatactgaagctgggctataacgttctcttgagtgatgtagatgtatattggttcagaaacccgttgcctctgcttcagtctttcggtccttctgttcttgcagcacaatctgatgaatacaatacaacaggtaatgatgatgaactgatcaaccagaccaactttgttataaaatactaatgaatttggcttttgtttggttttgcagcaccgataaaccgaccaaggcgcttgaactcaggattctactttgcacgttctgatagcccgacgatagcagcgatggagaaagtggtgaagcatgctgcaacctccggtctttcggagcaacctagcttctacgatactttatgcggagaaggtggagcttatcgcttgggagacgatagatgtgttgaaccagagacaaatctgactgttcagttcttggacagagagctattcccaaacggagcttacggggatctatggcttaaggaagacgtaagagcagagtgcgagaagaagcattgctttgttctacacaacaactggattagcgggagactgaagaaacttgaacgccaaatgatgaaaggtctatgggaatatgacgcatccatgaggatgtgtgtgtagagatgacaaggttatacaagttagatacttagatgggacattcaacggctcttggtatggtctattggatatagtttatacaaaattgtgtttatttattgtattgttgtatgaaaaatagttttaggaatatgaaattgtaaactgcaaaatattgttggcagccagagatgaaacaatataaaattgattttgattttttatatttattattgtactctccatgctaataatgttgtaagtcttacaaagattgtttaaagtcttatagattatattatcgtcagccactcgaatatctttgaaaaccaatctataaatcgaacaaaatagtgtcactttgttttggtacgtaagggtcactgtttcagtaaataacaagtctgtgaaagacctaaccattgggtcccatcattttctcataagtgcattttctcccccaaagttattgtgaaaataactctctttttttcttaagaattttaaggtttttaggtacttttgtaacaaaaattattttattttgaacttttatgattttgccaacaaatcaattttcggtaccggtactttttactcttttttctgtccggtaaaaaaattgtatagttaccggatggttatatattttaattaatttttcttttcaaaccattcaattagatttataatagtaaattttatttttattttatagactcacacaaaacttctatcatgaaattctgtgtctaataacaaaatttttatcttatccttttgaaaaaaaaaaaaaaactgaacatgagcaactaaataaaatcgtcctccccacactaatccaacaatttagttcaggggccaatagagttcgttatctttttttttataaaggaaaatatcacttttgtgatcatcacgtgttttgaaaaaccgatttaaaatttactttggttttggttcgaactgatcggtttatttttctggtcattaccacatctttatcaattatatcattgactacttatgggttctgttccggtgtacaacttgcatcagtagcagtaaaactttagtttttgaagagcttggattgaaaccaagttctgaaatctttttgtgagatttagagtagtctataatgaatttatcttcatcatgtgaacttgtctaaacaacaacatctaccatcgcaaaaacagtacaaatgggataaatcacttgtttatacattcttctttttcacttgtttatacattactcaaatttagattagatatatgatgttcaaaatcaaaaaaaaaaattaaccattaatcaagtaataaaataaacatggattatcattatacaaacatcaaatgttatttcccgattgattcctcttatatatcggattatctatgtggcatcatgtaataatatctcctcaattatcaaaacaaatatcaagatgtttaagatattgcaatgtgaaaaaaaaaattgatattgcaatgcaaatgttcatggtcgttgtgggcttttcaagggaccggttgcacaagacgagaggcctacgtcaatagaaaatatcaaatattttgtttgacaggagaaagaaatatagcaaaatatattatttgttttcccatttatgtttttttgtgtaaaagaaaaatacgaaaaaatatctagaattttactgaactacgataattatatcattttaaccatataagagaagaagaatctatattatagtacttttatcaaacaaacataatcttatttgttgtattacatgtgtgcatttatttaccatcacattattgtgttcaagaacatattgcttacctattaagtaaaatcaagcttgtctgcatatttgcctataaagtaaaatcaaaaatcgccgatggtcgagcgagaccggttaacataaatagtgtcgtatgggtccttcaaactccactcattttataacacgcgtcaaaatagtcctatgattttctttttgttttttgttttcatatgagagaatattccaaaaagaaaaaaattacgtcggcaaaatcttatttttcattggagcttttttgtaattaaattacacgacacacaaaaaaaacagagaataaataattttatacatatctacgctttacacactcctttgcattcttggaaaagcctctctctctatatatatcgattgaacattagttaattggctttaagaaaaacaaactatacaacaaccttctccaactccgaccttttcaactaagcataaaaaaacgatatggtcccaaatacaacaaccgtcaagttcctttgtagctacggtggcagaatcaccccacgttatcccgacggcaagctccgttatcaaggcggcgatacacgtgtcctctccgtcactcgcgccatatccttcaccggttagttagttaatcagttttttttttttttatcaccctacgaattctagggttagtgtagccgtctagtagcacactcaccggttatctgtttgataatattaacagagctaaagaagaagctcggtgagatttgcgggattgcggtgactagtctccgatgtcagttaccaacagatgatcttgacgcgcttgtaacggtaagatccgacgaggatctaaagaatcttatggaggaatacgatctcgctataacagcgcaagttaagattcacgtctttctttctccgcttaaatcaacgagaacaacagcaaactcgtctcctccaccttcaacgacgtcatcttcttcgtcaaaatcacgctctcgttctcctccatcgccttcaactccggaaacatgtcctagttgcgtagagagatctatacgtaacaatggatgttacgttcatagaagtccaagtcataaccaattatacttcatcaacaattgaaacaatctctctaaacattgtaacaatatagaagtcttgaattctcggaattatatttaataacgtgaggatcagtttcatatatattagcccaaaaaagtgagtccaatagatgtaaaagatcatcatgatgttgatgatgatgctagatttttttattttttttttccttttgtgattggtgaaagagtgtccttgggaatttttagtgttaccagtacacaatttctttcttttatgaaaatccaatgaatatgagccacgtggaaactcaataaagatattttttttcctctcttcttgaactgtacgtttcagatattttttttgttataaaccaagaaccaatttggtttagtatggtttaagatttacgtaaccggtttaaaactaactaaaaagcgcaattgaaattctgtttttaaccgggttttagtctttcagtctttcttcttcctctatacctctccgttttccgatgatggtgttgattctaatccttcttgtgcttatggttgttttgttttgtttctaccattttcttataaaatttcgccgctttcggagttgaaatccggtgaaagctttgcggaagaattc

SEQ ID NO: 132 - DNA, 110514 bp, Arabidopsis thaliana
gaattcaactggaatcaaatgacagtcttcttcatcaatatagaactcgaggtttttcggagctgattctgcagtttccacctctataggtagatccactctgttttcttcttccttctctgttgcaatttctttgttcttacaatcgaagcttgatacatagcatgaaaactcctcatcaacatcatcatcttcaagtttctcatgagattggggaactttcttctcctctgtttcttcctgagaatcattcaaatttacagatcctactttctcttcttcaaagacgaagatcgatcgaggaaacttaagaccattgtaaatctgaccttcatctccaattggataatctaaattcccaaagtcagactcaatcggagcacatagtgacgaacttatcttctctacgcaacaaccacgatgaaccaaatcattgtgaaattctccgaaaccacaattagattcttcaacaggttttgaatgtaattggagagcatgatcatcgcagagaagatctcgatgagaaggagatttaccagaagcatcgaagaaacgatcgagtctagagcagaagagacaaggacgtttaagaccgaaataatcagcgaatctgagtatgaaataagaaaagagagagttgagcaaaatgaagaaaatgagtgaccattcgagaaaagcgtatacgaggattaaagtgattcggtttgttttccgatgaatcagagtcgcgaatttgttagccgccatagacgacgataaagaaagcttgagagagatagagagatttgtgtgggggacgaagttaggaaggaggagaaagacttgtcagcttaagtaagttagccggagaaatcggaccgaccattagtgacacttttttattttattttaatttgaatttgacaacattatatatatgaaaatggaaatgaagctaagagtcagagaaaaaaaaaggttaggataataacacatttatgtatgtactaaattatttaaaggttacgggtaggtatatataatggaaacaatagttgtttgatattaagttttagtttatataaaataagaaattaagtactagtaaaaagattattgtttatactggttgaccgagttattaatatttttattcaatgttttggattcgattttatctgattacagttttttttttttgagattttaaccttccatttaggttttttgccaacacaccttcctattttaggttatagtctatatagattattatttatgtctgtattttcataaatagtaagtaataacatattttatcaaattatatttaacagagttatatattttttatgtattagttttaacatattaaaaaataaaaaattatcaatacttaacataaaaactatgaatcctttgaaatttataagaggagagtggattagtgtagcggaaagctactgattaatgattttattttttgtcgtcaagcgagtgatttatgattaagcattgctcgtgacgcaatcatactgttgaattttatttatgttgtttagctttttcagcaaaagaaacagtagttgataaaaaaaaaaaacttgccacgtggtttaaatgaccccgccactctgcctttaactttggaggaaaaaaatagaatgggcccatacatctgacccacatgcgcgtaaaagggcccacacattttgaaccggaaaccatagtatttttcagcggaaagaaacttaaaacggtgtaaaataacggtttaaatcaatgttagtgaggtttaaaaacaaaatatatttaaatgaagttatatgaaagagttttttcactagaattttgtattcgagagtttctcattagtaatttagttaggagtttttaaatagatggactaatatctaactttttttataattaaaacttttatatttaaaaggtttttctattaataatttaactaagggtttttaaagtaaattggccaattcgtgaaggatatttcatttaaatccccaaaaattcatattcattatgctgtcgtacaatgaattgaaaatcgattaataagaaggtgggtaacaaaatttcctttagtttccttttatttaagaacaccactttacttctttcattattttgaccaagtttaactaggcccgtaaggagaaccataaagagaggacaagaccttgttacagcttacaaccaaaataaaggagaccacagttaaaaataaaagaggtttaaaaacacttctactaaaaaacatggttgataaaaaagttggcggtatccaattttgaaagtatgcaactaactatgcatcattcataaacaattacatatgtaacgtgtgtagtgtagacaaggtaatcgatattcgaaatgagcaaataaataaagaaattgtgattaaaaaatttttaagagttaatggaccagtctaacattatgtgccacttcatttttatatttcacatcaaaaccgaattcattttaattaattagaccgtgtccatttttataaaatattgacgggacatttcaacattgtgtatgaatgttataatattattattctcttcgttagccgaatggttcacattgacatcatagggacatacaaatattgactttttcgaagacacattacaatatatgtcgttttttgaacctcgtggccttgtcaacttataatttgcgtgtttgcgaagagataatcatcaccaaatgtatgttaaacatgtaagtaattaatattcaaaggggccagtatatcccacttaaacttatactatgtcagaaaattaattaatattattgaaggtattaaccatatcaaatattcgatcactataccatagagagatattggaaacttgtgatttcgattatttgttttagcaacaaaataatttctgtgaatgaaaagggccatgtggtgttggccgtggctcatacaaagtttaatgacaggtcactcccacctcactgttttgcctaataatttactacttaattatagtatagaatctttccgaatttttgtttgatttggagtttacatattcatcgtagttttaagatttctaaggtataaatattggtaggtgcatgcaatcagttgaactttcacatcatttcttgatcgtttgttgatttagaattaaacaggtgatcgtgagaaacgctcctaagcaaatatatagtaaatggaaatcgattaattcaaaaaaattgaagtattattattctattaccatgtttattatactatgtacttatttgattttaattttatcattgaaaacaagaaaggagaagcgacctcaatgattaacattcgtcggccgaatcaatatagagactttaaaaattaaaaaaaatggtggtggggtttgcagtctaagcttttaggttaagcctttaacatgtgattaactttccacaccaatggctctccaaaatcccggaaaagaagaaaattatttcgaaactcacttgggattctaaaaatgtgaaaactaagaataactcgctagtcacttccatgaaaaaagtagtggtaacacttaatttgaaattgaggaataacattttatttttgagaaagaatttgattgttagagtatgttattattagttttctaaataataataacatgttagaaaaatggtaatggtatgggagattttattttttattttttataatgagtaaaaatggtgagagaaatgatggtgaattgagagttgttggaggaggtggggggtccaatggcccctctttttattccttattaaaaagtaaaataaccattacatagttctgattaattttgcaattaatagaataatattaagagtaaattttacaagatgttattttgactaactttacgggtgcttcatacacaaacgtaaaagaaatctatgtacagatgaatagtatcatgcaaatctaaaaaaggttacaaaataatgtaacaagtactttatcaaaaaaaaattaacagtgaaacaaagcatgtagtgtgttatgggagactcatgtcttatccgtttcaagatccatgcaagaggaaacattggaatgtctctgtcagtgtctctactgtgaagaacattaagggacagtagtttttgtctggttcgttctcaggttctgcattgtaacaataccacacactcatcaatgtttctctttatgtaatgaatgaggatcaatcaaatagcttataagcaagcaagtgaaatctcacaataggctactgtgaaatcacaacaaaaaacaactttatctgtatcaggtttcaacagtttctttctaattgaacagaatcaaatctttatgccaatttcattctatctacaagttacaacaaagtaaatcattatcctagttatgctcacttgctcagtcattatttagctagctttctattgaagaataacaataatcaaatatcgaaaatgctatttctctgttggatcaaaggatttcagcttcaagataatgacaattgacacatttcaccattcttgatctctctttggttatatctactctaatttacatcaatttacttactttgaactgcctcactttcaaagacatgaaccaaattacagaaacggcgatgcaactataaaatttggaatacatgtggaatttggaatgagattattcgtttttatttcattttcttgaaataaaacactatatgccaaaatcaaacgtgggacctccttatgacacgtggaatttatgtgattcagacaaaagtaatcctagaagtctctgccattagaaccaatctcaagagataaggaaacttcacaaccaaaaacaagaacaacagacacatagagatgagccggtgcggctctcttgggctctatgccccaaatgctttgccatctctctccttgaagccacgcagtgtcaaatctcctttctgtattacatctcacaccaaacccaacgacactcttcttcatgtaagacttctctaccttagctaagtgtacaaccaatcaacatgaatctgcagaaaactctctgcttcttcaccgtgacttattattgttcactgcagaatgttaacaagatgagagcaaaggcctgtgatatacttggagcaaagaagacaatcttggcagctcaactcggggcagttcttgccacggtaagaacatacgagacctttattcactatcgaaactatgagacaacagtggtcagtaatcgaaaatcgttagtttttcagattgaccatccagccttagcaataacaggagttaacaaccagcaggaattgagcagtgttgtgctcgatatcgggatcatatccgtttggtacttcctagtaatgccagtaagtttgaggacacatacattgtattttcaaagatttagatgattcatgattatgagtgtggagcttatatattatactatggtttgtgttagccaatcatcatgaactggctaagagtaagatggtacagaaggaagttcttcgagatgtatttacagttcatgttcgtcttcatgttcttccccgggtaagcaagatcacaccatctcatttgcatcaatgcttacttactctcttactctctagtctttatcaagattatcattttgcaggctactgttatgggcaccatttctcaacttcaggaagttcccaagagatcctaatatgaagaatccttgggacaaaccaacagacccagactctataaagaacgtttacctcaaatacccatatgcgacgccagaagattacgatctcgattaacagatagatccacaagtctgtttcatatcttgagactgtatgtatatactctgcattcacatgaacacaatgtaatggcttgtgcatacacttatgttcaagagaaatccaaatcaaacatgtaataaacagaaataactttattgtcatcagggaaaaaagaagaaatataaattatctcagaaacaaattaaacagtctaaaaaaaaccttcaacaactttgaacagactctgtgattataaaaacgaaaactctcattattctcttcacctccataacccctaagttctggtcaagatgttcaaaattttgtatcttggagagtaaaaggctttaacttttaagtaattctctacaccgatgatattaagagttacctctctatatcatcctcaggtttttgattgtttcttttctcttacttcttcaaagctgtggagataacctcagtgtatttgttgatgtattcatgcagctccaatgagtccaccaggttcttcagctcgtttgtaacctccgggttggaagatagaacagctgcagcagcggctcctgcagcagctagaaacactaaagtaatggctgttcctttgaggcagccacttccacgggagagtctccccgagatcgttttgcaagacttgtcagcttctttgtaaagagaagcattggctcctccctcagtgatgacctcctcgttctaaaacatcacagggaaatatcggagattaaatttacaagagactggagggtgaaattaaagcttagaaattgtggaggctcttacctttagcctgaagcttttcatagttcggttgagagtgagagcatcattcggtgatgatgatagtttgaccgaatgctctttccattcttcaacaagctttttaagaacagcaacactagcttccagattctccttgtagagattgtcccagtgcttgcagcaatcaaagttttgggtcacagaccagatagcaattgctgtagcttccttggctaaaacaggatttcctgtaacaacgataacattaaaactctaatctagcggagctgagggaagcagaaaactaagggaatcaagattgttaatagtaccttctccagctaatttcagagcaaaagtgaatatctgttgtgtgacttgtttcatcgccttgcttcctggtgcaccagcaagagccacttctttcagcaagggatatattgcctcaaacctctctgtagcctgtgtgcaacgaagatcatgcttgtgagaatcaacaaaatgaatcaaggtttcgttttacaaaattccagcaatacgacttacctttactcttgcagatgatgcagggaatgtaagccgcaacaagatctcaaatgaaggaggtggaatcaaacgctctcccttcctaacagctccatttacaagtatggtacgagcctttggattcgtcaaaattctgataagaaaattgcatataaacaagattagatgactgactacaaacacagcaagaataagaccacaagaagttttttactcacttctcaaccaactgcaggatgagatcccttgactgagggttacagttcttattaccgacaacaggtaacaagttgtgagcccatgaatacaagcctacagctatatcaccttgggaggcctgtccacattttacagttttacaaaaattagaataaagatcacagaaaacacaaatcttgacacaattaatactcatttacaaaacaaatcacacaaacctgagccatcatccaaactgtaaccggaagcttatcctgaccctgatacttaggattctccctcagagttggcaatacattagtcaaagcatcaggcttcctacgcaataccatcgctaatgcaacaaatattgccacctatacgaatgtacaataatggacttagtaatcgaaaggtaataacattgataatcaaagatcagagtttagagatcgagaaaggttttccaaatcacctgagatttggaagtagtttgttgaccacccttcttcccacctttagcaccaccttgttgtgctgctaaatctgtgagaatacaatcaaaagcccacaacacaaaggctccaagtgcctcaattggacgatggttgatccaatcaactgatgtcttatacactggttccggaatatgagctaacggaacctattcataaacaaaaacgatctcacctttatcaaaacctaaacctagaatccaattccaaaacctcaaacaatgttaaaaacacaaactcacttcaatcagcttagacaaaggagactctttaaacatcttcacccatggaaattgcacagatgagactccagaaagtgctctcccaaagtaatcagcaaatctcattagctgaatctcaggctgactcgcatacgattcctataaacccaacattgaaaaaacgaaactttagatcacaattcagctaaatcacaaacagatcaaaaccaaatctcaaatctcaaatccatgcacataccgatgcttcaacgagaaaagcttcgagatttaaaggatcgatctttgatgcagcttcaggcaaagaaactttaggcttcttctccttcttaggctttggcttcttaacttcctcaaccttcagcgttgcgatctcatcatcactaccatcaaaatcatacccatcatcaccgtaaccattagatcgatgtttagatctaacaacaccatcatcatctgaatcaatagcagtcatcttcgccgctaagatccgtcgtcgacgatcctcagcttgctcttccaacgaacggaaaacgttatctccgccgttagctacggttccatttgaagcaacagttttgccaccatttgccgtcgcttgatccgcttgtttttgcttccggtgacgtttcgggtacacgactttcttccaaccatggtcgacgttaccgttagaggtctcgaagccattgtactcgacagattcgatcggatccattattgggtattctaaagtttctagctttttctcgcttttttacttctctctctctatctccggcgtgaaaaacagagaccaaacaagacgacgagatttgaccggagggaagagtatatatatataagagaataatagggtaatagaaagattaaaaacaatatccttgttttttatctttactacgaaattgccattgatattttgtaaacacagattttggaccaatcctttgggatttggttttgttttgttttatttttagtttaattattttttaatttttatggattagtgttttgcatttccccaaaattctagaaatgatgggtaaaaaatatcacagcctctgtttttaaaatatatattttttaccgtgaatatagaaattttctatttttctgattggttttactttggattggaacaaatattctcagaaaatcaaatctttgttgctagtctattctttcgttattttggtgaaatgtatgataatgatgacactaacgtattataattatcctgttttaagatttttagatacattagcataattatctaaaatttggattatgtttccaaaagtcgaaagctcctttctttgtcaataagatcatttttttcaatgttcaaaaccattattttctttctatattttgaaaatgatgattttatacttcttgcagattggatattttcatgtggattaaaaagcaatttaacaaaattgttaacaaaataaattaaaattttctactatactcctaatagaaattgactatattttgtaacttcaagcaatttaataaaattattaatagtataatgtttttctattattatactcttaataagaaattgactatattttgtaatttcaagcaatttaataaacttattaacaaaataaactaattttttttatatactcttaatcagaaattgactatattttgtattttcaagcaattcaataaacttattaacaaaataaattaaattttctattatactcctaataacaaattgactatattttgaattttctttaatatgaaataggaataaatttaatttttttttgttaaaaattatatattaaatcgtaaaacagtaatcatatctttggagtatccaataaaatagaaatagtacagagaaaattagtatagtctctctatttagagatgacacaaaaattgaaaaatagttcaaagttataaagaaacgacaatttttaaaaaaatagaacaattaatttaaagggacacttattaaatcaggagtagcgatttgtattgaatagacaaatagtgtcaaataacttttggaatcaaggaataatcacaacctcattttgcggacagatgacgtgctaccgtgcatcatgttaagcatacgttattccctaccttaaaaccttcaatgaactcagtcaccaaatgtcttcatgttccaccaaatatctccactttgaaagatatatgcatatctacaaactcttggaaggaatagtgaataaagttggtgttttgttttttcctttttgataaagagaacaacgttacgtcggtgttattactacactaaaaccagcattggcagtttactaacaacagatggagcaaatctgtagaaatcgtgtctcctctaaaccaagttctctactagctaggagaaacctaccgtcacagttttgttccgcagctctagttttggaaatccttcaaattcattgtcaccttaggtaatcataaacacaccgaagaaagacaacaatcgacaaatcaagatcaagtctacttttttttccttcacaatttgtggtcatttactcatttttaacaaagttgaagtatattgacgctaacaacacttttattttattccaaaaagaaggatctacaagtaatatatgatatatgttaacaaatttttatgttcattcttcaaaatttattaattttagaattgtggagaattgtgtgattcataaatccataaataaaagtgaataaaatattgatttaagtgggctgatatagttttggcataaaagaaaatggaaagtggtgcctatggtggtggagaagttgtcgatatacaaatagtcaaagaaactcataaatatgccatctcttaaggtcaacggaattaatggccaagtaagtaacatagccgttcatgtgtaatgtgttcgttaccactaattatacttgtattacaaattaaatacatttattatcggcgaacgtaacgtgataataatgagagcattcatacttacatgcttgcatgttgaaagcgaattggtttcccacacactccaagtctccaaccacaatcccgtttaatttcagcttaagtataattagtaatacaacatttgtataattaacagaagaagaaaaaacatcaagtaattttaaaggtgatttctgtttatctgagttttttttttttttttttaggttcaaatacttgttactattttttttaaatccaatctggttttagataaatttatgttttttagaaatgtatatcttacgtttttagcaaaaataagttttctatagaataaatagcatttaattttgtaagataccattgtactattaaaaaaacattagattatttatttgcggatcacattcacattaaaatcatatgaatctttcttttttttttttttgtcgtctcatatgaatctttttaaagctaacatttgaacccccttctttctcatttttcaaaatatgttcatcaaacttctttttgattgtttttcagttgtaaccaattatattgttttgtcacgaagctgtctgaaaaagtaaaagaaactaaaagtgaaaaagtttttttttcctttcgattgaatttagttttcttaacttcaagtcttcaaactaactgaactgagttgaccaaaaatgtgttcctttgagagtgaaaactgaaacgtatgtttctcatgagcacttttaaattctgtacatcattttttttttttttacacaaagtaatttcatttattaattgtgtaaataaatagtttggtcaaattgaggccggtagtttttagtcattcggcccatcaaacatctaatggattttttcttttgacgtcaatggattgaagccttaaagcccataataaatgtaagtctaactataaacttatttcttttggccatagctagtatttctagtttccgaatatctaaatactaatttataacatgttttaacaaacaagtacagtatatgttatatactattcaatcagaagaagaagaaaaacagatacttcttttgtttctgttcgagttaaatcgtatactataggatgattacatgtaaccgagagcgttggcctaacaatttaccatgattaccttgccacgatccaattcgaacttaaaacaaaaagagaaatgtgacatacacgtggcatttagaaaatatctcatcatcgttatcatcgtatgatgtgcatggttggtcaatggtcatagttagtgagacaaacaccgtgttgtttttatgacttatggaagtgtgtagaaacctccggcgttggataaggaaagtgtggtgtgcgagacgtgtagtaactagtaaataaaatagtgtgtcgttttcatgataaggaagaagagaagtaaagcacggcaacaacacttgtagagaggcaagagtacaagttggtacggaacttgtgtagtagttttagttgtttatcatcattcatttgtactttcttctatttttcttcttctgtcgcaaagtttgtttacctttttctaatcaaaatcaaacttttaacacttttaattttggattctcgacaatgacgtctcctccacaacttgacaccttaagacaagaacattaaaaaagtatataccttaacattattcctcttcacggatacaagtatacaactatcactttaatcagagctctgttattgcgtaacaataatttcaaaacgtgttttacgagacgaataatacagaattgtactagagaaagtacacaatttgctgacaaatttcctcagttggacaacttgcaagaagaagcatcaaaagaaaccaacttcaacacttgaaacagtgcaaaatccagaagaatttgacacttttattcatgaatgaaagatgaaaataacaaactttggaatcaaaaccaaaaacaaagaacataatgatgataaaacaaagattggtcttattatttcataaaaaagagaagaaaattaatcttaatggcttgagactttgagattgaaggatttgttgatccaagccttcaagcttccaccttttcttgcaccattaatggtagagtcagatcttccattactttcctcaaccttcttctcctctggtttcctacagagcataaagttcctcgctccaagagatccaattgcatcccatgtgcttaaagctgtcatcaaaacacaacatcagtcaaccaattctttaaacagatcattcacacataaagctaaaagacattggaattgagtttagtttaccttcaggtccaaccataggacaatagagaagaaaatcattgaaatcagatccaagaagaggaagacgaccttcacgagcgtaacctttaagagcagtatcgataacagaggcaacaagatcatcctcataagcaacaaaccggatcggaccggcactacccaaaaccgtaacgctaatgagaatcctattccctttagcgttttggttcttcttctgcttgttgtagagcaacatcttcgaaatcgagagaacaaaaaacagagcaaatctcacaagtaacagaatcaataaaaaaagaaccactttttaggaaattagggttccgggttgtgaattttaggggcgaatcgttcacgggtcgaggccaaggcagcgaaagtaccagccttctttgcaagatccgaaagcgaaaacagaggatgtcgagagaggaagagaaaagctcgcccttttgatggaaagggagagcgtaaacttaccaccgatcggattagtttccaccattcacaaacgattcacacggagagattttgattaaccggagaagacgagagaagaatatgctttttggtggtgaagcagaggaggaggatttgattattttttttttcttatgggagaagaatgtgattgttggtgagctaagagagacggtgaggttgtttataaagtaaggtggttaggttaaaggcttttttgggtaattttgaaatttgagaatttttccggttttaccttttttggtgcttttgcatacgtgtcttttttttttaccaacgtgtaattaaaagtttttttttaaaatatatttcaaagctcaataaaatctaagtaatcttaataaattttaactacataaatgaatatctaagagtattgataatacaacaaaagatctcctaaatataattgtaaaacatagaaaagcaacagtgtagtaaatttgtaatatgagaagagtaaataaaacgttatttaaagtatttaagataagatcgaatttaatatcatacaatctaaaatttgtgataaggacgagtttaaagaagaaaactatttcttatttcttatgtgttaattttaccaaaaactttaagaaaatgttgatgcatgtattagcaaggataacaattagttaaagatacggttttcataaaaattgaaaagaaataaataattttttttttaaaaggaagaatggattaaaaggtttggcaaatagaaaggctagaaaatctctagctaaatgtagtgatgataatcgataatttgatcgttatggattataccaaatgaatgttattcgcccttgttttttttgctaatatggtggaaaaagttgtagcgaaaattgtggtaagtggttcatatgtgttgctttttacgtttatgttttgcaagtcatgcgaactgaattgtatcattagattgacatacacgtatttaaactaatagacatgtgaatgctatgtagagtatcccactaaaactaatcacataagatacattttaccctgatgttaagaacataaaaacaagcgcaaacacaaacaaattaatattttgaggtattagttgtgtgcggtgtgcgggctatatagggaaggtgatgaaaatagattttaggttgggactcttaaacatatcggactcgcttgtttttgtttttcttgggggtaaaatatgaaagtgataaaaatagaaaaacggtcgctatcgaagttgagcaacatgaaaagagcatcacgtgtcattcgttaggccattgttgtcctgatccttgctgtttttagcttccgccgatccaaacctcccccatattaaacttgaaaggttacacgtttctttaattctaggactttaagttttaaaagtcttagaaacctcaaacctcatctatatggaatatagttgtggtatttcagagtattaaaaaaatgaacgttgaggagagttgtaccaaaatttatcttttaggcgtgatatttcttagatagatatacgcaacatttatcatggttatcgacaactttagtttgatttttggcatatacctaaaattttgtaattttctaaggacttggttctaattaagaggctcgtccgctaggcgctaagcatgtttcatgtatgttcttcattgtcttttattaacttttcgaagcgttgaaattcacttctttaacatgaattggggatttaattttggagttaggtggatttaagtcatagaaagaagaaaacctgtcattaatgtgaacgaaaaaatgtaacatctataaaaaattgatttgtataaattggtttgtaagtctctaaagatgaaattgagtcaaatcctttttttagctaatcgaatttaataaattgacaaacgcgttaagtactagagaaacaaaataaacatgattagctagcaacggcggaatataaactctataaagatcacgaatcctttcgcatcgatatcttaattgccgtatgaacagtataattaatcttctcataatatggttattatactaataaattatatgtatagccttgtaggtaaatggaattattatggaaacagaatcaggtgcagagaaccataatgggccatgatcttgaatggtgcagagccaattcaaaatcatattatgactaaagacagagagcacatgactcacggataggaccagaagtatagagaggtcgtaattcagtttaagagaagacagctatcgatctcatttcatatgcattatgatctctggtacatctctatatatatcacctaacttcgtcttatcatatcagctcctcctccatgtcttatcctgagtcgcccattgtgtcacaaaccggttaacctaattgtatgattgatcgtgtttgcaaccatttataccctaaatgttgattacctcgttaataatatgccgtagattttattaatatgtatatgtgtgtaccaaattacaacgctaaatgaattttaaatccttggcagaaaaacagttcacaattttatatcctttgttaaatttaggttgtcgtgtccacattgtatgatctactcataagctcatagcatcgagtcattgacatcaactcattgttctggataatacaattgattatacatgtgtcacacctgatgataacttttagaatttttaaacgtgattttatacggacatctagatttgtttggatttcaatttaaattgttttttttggtttatatatttagttatttacatgttggttagtgttttattttatgtaagatattttcttacaatatctgtatatctatccacatctaatacatttagattttaaaatatcacatacggttaggatttgtattccctcagtcaaagacaaaggagtgggcatatagtatttataccctataagtaataacaggtcatttaaaaatttgaatagcttattccaaattaatttcatccatagaaaaaaacctaattaatgtgacagctgagctgaccatatattgttttttttggcacaaccattgtgtttatataaatcttatgattttatttcaaacgtacgataaggatttaggaaacgaacaaataaaatgggaaacggctcctctttaattattgaccagccattctgtgtctgttcaattagcgactagccagattcccaaatttcctcattgtccattgatttcaattatacgccaactcttctagattcagaggtaggtccatgaacttcaacatgacacacgttattttacttatctcagtctatatcgtaccaattgctccatattatacaatatcttataactctaaatgtcagtcgcatctaagattcgccactagttattatcaattcacccaactagaatcctcagttttcagtcgttctcaaaaaagtataaaaggattttttctattaaaaaatgtatatatatatatatatatatataaaacatgatagaaaatagaaaatttaccgaataaaaaattaaaactaattcagccgtgacaaaatacctaaaaaattatcggttttgtttattactcattctattgatcaaatactcaattttatatacaattattagatttttgctacggaacttagcgtgataaaactaaaatttcaaaatttaagataatcaaatggaatgtttagcccatatgtcacggttttaacaaattttgtttggttatgtatgttaacacatctatgagtttaattatatgtcaaataaatagtagaagtcaaatgattgaatactaaaaatattttcactgaacatgtttctatgaaataactgaattttctaattatattcatatatattaatttaactacttttaattatgtcaaaacctaaaaatttgataaatactttaaatgataaaacaagacattcatattaattaaacgtgaaaattgtataccatatatagtattcacaatatataatataattactttttgtgctttgcttaagatgcagtaaatcgatttgattagtctctaaagaataaatcttttatttggtcagtttgggtctaagcaataattactggtattaactttaaaattataagagtctagggactaaaaaagaaactaaagatatcggcgacatgaatgatgaatgagaaacagagaactctaaagaaagtaaaggagcagcgatgaaatcggttgtccgcaaacaacggatagatctgtcgatgtttgtttttggaactccgcgttgaatcagcgtcgatgtttctcgtaagtttgcataatccaaaaactcgttttcgaattataaatttcatcaaatccccgcttattttgggtaaattcaggcaaaaagggtttttgtgttcttcgatattatctcttattactattaggctattatcatcgccttattggggaaaaagcttcaaacttttatataaagtctcttcctttttctttctttctcggtggaatttgcagcaatggaagataaaccattagggattctcagggttcatgtcaaaagagggattaatcttgctattcgtgatgccaccaccagtgatccttatgttgttatcacattggctaatcaggtttggttcatgtcctttttgattagattatgcatcgttttgggtttgattctttggtgatcacaaatggaatgtggattatgaaatcttattagagttatagtcacatggtggaggtacaatgtgagggactgatcattaccatgtgatggtttttgtggccacccatgtgagaaagatctcaatttgatctttgctttgtgtttctttggctaaaaaacaaaactttataagacatcctatgcaaaatcttgtcatgttctgaaattacaaattcttgtattagtcttgtgttgcaaaacatatatttctttttcaatataaaattttgttgaagggtattagtctttttacgattagtctctatgcataatcttgttgaagagtcatctcccaaaactaatgagcatgtataggctcttgttgaagggtcatttcccaaagctggcaaatcataattacataatcttgttgaatggtcatctcaggatcacagtttgtcaaatagaaacaatgtcatctgggttaagaaagttgaaagtggacatgattgacttggcttagatgattgtgtctctatggttgtactttgtgaagccttctttatcattatttgtactatgtaaccttttgtttgtgtatttctttttcatatcttcttgacccgtttttatctcgttcattcagaaactgaagacgcgtgtgattaataataactgtaatccagtgtggaacgaacaactgaccctttccatcaaagatgtgaatgatcctatccgtctggtaagctatcgtgtctattacaatttacgacggtcttctaaagaaaccgattgttggctcatattatggtctgtttatgcagacggtgtttgataaagatagattctcgggagatgacaaaatgggtgatgcagaaatagactttaggccgttcctagaagcgcatcaaatggagttagatttccagaagctccccaatggttgtgcaatcaagaggatccgtccaggcaggaccaactgtttagctgaagagagcagcatcacttggagcaatgggaagatcatgcaagagatgattcttagactaaagaatgtggagtgtggggaagtagagctcatgcttgagtggactgatggtccaggctgcaagggtctgggacgcgaaggtatgttaacaaatcctcggtttttgacttgtgcatatctatgattgcgattaacatgcgagcattggttcttttaggatccaagaagacaccatggatgccgacaaaacgattggactaagatgcagaaatgttaaaacagagaccgtgaagatgtgatggtattttttcgttatgttcatggaaagacgagtttgtctttgtctcatcagagtttaaattgacaaaaaaggctctgctttggtctttagttgtacatgtcgaataactcaacccttatatatattgtatctgtttctactaattgaagaaataaagcaaaccctgaatttctagaacctctttcaatcttatttctctggttctggtaacattagaattagctcacctatatcagtatgtatacaaaattatatttgcagggtagtaccttcttttttgtgaaatgtaatgatgatatttctaatgtcaatgtcagaaaaagacaggagatatttcttatgaatagaatctagaaggtatttgtgtgtgagtaacgcgtagatgataattaaagtgagttagcaggaaacaaaaagttggaaaagagaccttttgaattcacctttccttttcttttttgtttctttcttttaataagctgatttaagtagcatcgttgaatttgagtcggtgattgtttgtaagtgaataagaaaagtagtagagtcaggagacaggtgtgctttctcttcaaagctcagaagcaagatggagaaaacagaggaagaggttgagatgaaggaactggtagggcttgtgagaatcctagtgaagagagggatcgatcttgctcgtcgagacgctctaagcagcgacccttttgtcgtcataaccatgggtccacaggtactttttctctctttctgattctaatctgatttggttctcttctgtttgatgtttctatttctgttcttgagatgtatggtttctctgtttactttcttcgcagatggaagaccaaagaatcgacctttaagaaacatgattaataatcatttaaaaagattttacatttcatgctacaaaatgaaaacaatctatagctataggatgttgtgttgcattcgttctaactgaaattggttgtatctttgaattgcaccagaagctgaaatcttttactgtgaagaataactgcaacccagagtggaacgaagagttgactcttgcgatcgaagatcccaatgaacctgtgaagctggtgagtactagtacccgtcagtaactaccggaatcatgaattttcaactcaaaaccaactgatgataagtggttggttccatatgtttttgtttcgtatgagtgcagatggtgtatgataaagatacatttacagcggacgacaagatgggagatgcgcagatagatatgaaaccgttcctagacgttcacaaactcggtttgaaagaacttccacatggaaaagagctcaagagaattgtgcccaccagagataactgcttgtctgaagatagcataatcgtctccgataatggcaagatcgttcaggacatgattcttctgttgaagaatgtcgaatgcggcaaggtcgagatccagcttgaatggcttaaaaatccaggtggtagtggactctgaaaaaacagagatgaagtagctttatgattttctgtgtgtaataaaaaaaatctcagttaataaaatagaacagagtactactactctgttttgtaatggaaatatatttggttttagatctaaccgaaaccgttttggtttcccgcgagttttctcttcatcacaaaaaagaaaaagtgatatttatgttttatattggtttggtaaacatgttcttggaaaagtcaacggcttaaaccttttgtccatagtcagaaaaaaagaagaatcaagaagatattattaccaaagatgttcgtgagagtaacgcgtagatgagaataatatagaaacaaacacctggaaaacgaaacctattatatagatggtctttattttttgtttctttattcgctctatcgtccattgataagccaatttttaagtggtcctcgttgaatttgagccggtcattgtttagaattaaaaaaaaagaaggtaaaagagtcagagccgcctagagaaatcgatcacaaattcagaagaaaagaacagagaaaacagaggaagaggtgagatggaggaacttgtagggcttctgagaatccgagtgaagagagggatcaatcttgctcagcgagacactctaagcagcgacccttttgttgtcataaccatgggatcacaggtcttttctctctctatctctgtctttgattctaatctgatttggtctttgtggatttcttctgtttttgagacatatatctctttttatcaaaatattgtcctccaagaagcatgataaatttcaattaagtatggaaaaataagagagtttaaacaacagagaaatgaaatcaatagataggtttagtatatgattttgatttttgatatagagaaaatcgtctttcgatattaggatgttcatatcttgcatgcactctaatagaattctttaaaatgcaccagaagctgaagactcgtgttgtggaaaataactgcaaccctgagtggaacgaggaattaacccttgcgttaagacatcccgatgaacctgtgaatctggtgagtacttctatctgtctatttttttattactggctctaataggaatcatgaatttccaactcaaaaacaattgacaattagtagcgtttttttacagatagtgtatgataaagatacattcacatcgcacgacaagatgggagatgcaaagatagatattaaaccatttctggaggttcacaaaatgggtttgcaagaacttccagatggaacagagatcaagagagttgtgcccaacagagaaaactgtttggctgaagcgagcagtatcgtctccaataatggcaaaatcgttcagaacatgattcttctgttgaggaatgtcgaatgcggtgaggtcgagattcagcttgaatggattgatattccaggttctagagggctttgaacatatctctttctgtgtgtaataaaaaaaaaactcagttcgttttgggtttttagacaaaagtcacaataagtagaacagagtactactctgttttgtaattgaaatatttggttttagcacctaacctaaatcgttttggtttcccgcgagtttttttattctgttgtttgtttgcagatgaaaaaaaaacgtggagaagaaaaaaacaaaaacgatctaataagcttggaagtttgcttgcagatattttttttttgaaaatttttgtggttaaacatgtgaaaatgcagagatattcaaacgtaaggttatggttacatctagtaacgaatcttatccatctccaaatcccaaatttgaaaaacacttccaagggaaaaatcgcggatacatacaagattgcaaatatctaagcttggaattatatttgttttctttctttggatctctgctttcaagtctgaaacttgaactctgtttctaatttacttcaaaagctatggcgtcgacttcaacatcatctttaatggcttctaaaactgtaatctccaaaacagctctgttttcttccttaccgggaatagtcagccggagttttttaacattcgcaccggcttctccttccgttaaaccccttaggataagatcttcaaatgttactaagttcgatgaagtaaccaacagtcttgacgaagacatggaccagattcgacggttacaaaacggttctgacgtgagaggagtcgcattggaaggagagaaaggtcgaacagttgacctaacgcctgcagctgttgaagcaatcgcagagagctttggagaatgggttgcagcaacggagagtaacggaaacggcgtcattaagatttctctcggacgggatccacgtgtttccggtgggaagctaagcacggcagtgtttgccggcttagctcgtgcaggctgtttagcttttgacatgggtttagctacaacgccagcttgcttcatgagcacgttactctctccattcgaatacgacgcttcaattatggtaacatacttttcaacttaaaagctctgtgtcttgtgtgattcctaacatgtttagtcgttgtggttttgaagatgacagcttctcatttaccgtatacaagaaacggactcaagttctttaccaagagaggaggattaacgtctcctgaagtggagaagatatgcgatttagctgcgcgaaagtacgctactaggcagactaaagtctctacattgatcagaacgcgaccgcagcaagttgattttatgagcgcttactctaagcaccttagagaaatcattaaagagagaatcaatcaccctgaacactatgacactcctctcaaaggatttcaggtaagagtctagctttgtggtctctctctctcgctcttgaaattttatgtgacaacttgtgacgtttttttggttggtgtatgttagatagttgtgaatgcgggtaatgggtcaggaggcttctttacgtgggacgttctagacaagttaggagccgatacattcggttcgctctatctaaaccctgacgggatgttccctaatcacattcctaatccggaaaacaaaatcgcaatgcaacacacccgagccgcggttcttgagaactcagcagatctcggggttgtgtttgatacggatgttgacaggagtggagtggtggataacaaaggaaatcctatcaacggagataagcttattgcgcttatgtcagctatagtgcttaaagaacatccaggtgggttacattaatgatcagcgtttgttaatccatatttatgattgattaacttatgtgactttaagataatgtttttaagtataggaagtacagtagtgactgacgcaagaacgagtatggggctaactaggtttataacggagcgaggagggaggcattgtttgtatagagtagggtatagaaacgtgattgacaagggagtagagctgaacaaagacggcatcgagactcatctcatgatggaaacttcaggacatggtgcggttaaggagaatcacttcttggatgatggttagttcattactactcttcttaattcttatttttgtttcatttttttttaatacttgggaaaaattgtaggtgcatacatggtggtgaagatcataattgaaatggtgagaatgagactcgcgggatcaaatgaaggtatcggtagtttgatcgaagatcttgaggagccgttagaagcggttgagcttcggttgaatattttatcagagccaagagatgccaaagcaaaaggcattgaagccattgagactttcaggcaatacattgaggtataaatagttataatcaatatattgattggttatggctgtagctttagacttggtaattataattgtggaacaaataaaaatggttactaggaaggaaaactgaaagggtgggaattaggcacgtgtggggattgttgggttactgaaggttgcttggtggactcaaatgatcatccatctgctattgatgctcacatgtacaggtaaattaatgtgctcacaaatactttatattatatgatagtacatgctccaatgcgaattaatagtcaataattcagggcaagagtgagtgatgaagagagtggggaagagtatggttgggtgcatatgaggcagagtattcataaccctaacatcgcacttaatatgcaatcaatgcttcctggtggatgtctctccatgacaagaatcttcagagaccagtaaatttcatatatatgatcgatctacttctcagtgtgaaagatatggttatgagtaaaacatttgatgataactttgaatttatgtgtgtcgttgatcaggtttcttgaagctagtggggtggctagattcctggatataagtgacttcgacaattacatcggaggtcaatcttgaaggttcttaattaaatgtgaaatttgtaattaaaccacaacatgaattcttatgcattgtatatgtaaataaactatattttttaccaggtttcagtctttctcgttttaagtctcgcttatgactatgaattatgtagttaaatcattgggaatcatgagatatttaagcgattgtcggcccggtcagaaaactcttttctagaaataaatgttttggtgaaattgttgaaaatcacaagtttctaactcaaaatcaattgaaaatgaatagaaagactcatgtttactattgctaacgatcaatcacattgccaatgtgagatattcttctcgagatgatgcatgttctaaccattcatcttgacaacatatcaatatctcatcaaagcattaacctttgcttagataggtcgaactaatttgttacttgaaacaatgtgtgtttgtgttctatattatgttttcatgagttttcaactcaaaaaaactaattgacattaaggtcgataggtctatatttcttaaatttcaactcaaggtcctatcaaaatatttacaaagtaaactgcaatgaaccacacacactctctaccattttttatattgaaactttgttttcagacattagacacctaattttgtttatgatagttcaatttgttctcccgaataacctattttgttgatgaatgtacgtatgtaaataaataatgtctaaattctaacttcatgtcatcaaagaggttgttgctatattcaaatccattattagtcatttttatacttttgttctttaagaaataaatccaaactttctctcgagtaatcatacctactaaactattatgtatagatggagaacggcccaaaaatcataatgaatatattccagtaaaactagactcgtgtggtatccaaaacacaatcttcttcatagaaaccaaatttatgcattcttttcttgtctccatcatgtataatgtatttttccaagtgaccactgaccataatgtaactgtcacagattttaaaataactaaaagcaataattgaaaaagaaaaaacactttcgaaaaaactttacagccttctaaccattcaggtctgaatcagaccgtctgattcatagttccaatggaatgccaggaacgtactcctctaataagactgatttcgcacttcaacgaattttttagagcaaaatatccaatattttattaaaaattggccttccattatgctctatcttaaatgctcagttgctcacccaattttctgtctacgtatttaaagcttaattatgtagaaaacatttgcacataattttttgtctttgggaataaagttaaggattgatttggcaaaccctacaactaataaatcggaaagaacatttcagaaactaacatcaaatttattaaatataacattgacaaaaggaataaacaaaaacattcattacatttaaaggtaaaactatctaaatagttggtgtttgacagaaaaaaataactatctagttaattcgatttattatccctattaccaaacatagtctaaaattctcactctaaacacttacaccttttgtttttgttacatagttttctaaaagcctaaaacaatgaattttacagtattaagaaagaaagaaaaaaatcgtgtacattattaaccaaacgaaaccatttccttatctgatcaaaatgaacgtaaagtaatccgtagatatgattgaatatatctgcgggaccataataatgtcaaggtaagtaattgggatgacagatcccctcacatcactaagttgaatattgaatgctccctctgcataacatgttccaatattcaaataatgtgtcgggtggatttcgtcgctcagtatgtttttctgatctttagtaaatcatgaaagcataaacatagggcttcgctagtccaaacatttattattagcaaacatatataacatacttattatatatttatactagcttcatcacagctactacacattgcttctcaaagttacagtagccaacgtaaaacgatcttagtatacatacattcatgatgcacactcacattcatatatctcacaaagacatggctcttagtccttatttattgcatttaaattcaaacacgaagagtagtagtactcctctattcctcggccaaaagatgttcgtcgatctctttcgagacctcgacacagaattggaggagagtttccggatgagctacctcctcgcttattttctcatactcaaggtgccagtgcacaatacttccagggcctccaagcttcggggtcacctggatcgtgagcaagaagctcttgtactctttcatcagatcaccgtcgataaccctaaacgtgatcaagttcttattcggctccactgcctcaatcctctccttagccacctttgcctctctatctgcaccaattatttaacaattgatattatatgtttaactttgagacatggttatacatgaacaagatgtatataacattgacttgccatgaacgtagttccagaagacgatagagccgacttgaccccagtcgccttcgtgaagatcacaaccttgaatgtttcctggagatgctttagagacatggtgtggtttcccggcgaacatgtgatggaacttctcagcggaagctttgatctccacgtctgtctctagctttcccaccaaactaggcgtctctggtgtcttcacctcctcttcctcggccaagagatgttcgtcgatctctttggagacctcgacacagaactggaggagagtttccgggtgagctacctcctcgctaattttctcatactcaaggtgccagtgcacaatacttccagggcctccaggcttaggggtcacctggatggtgagcaagaagctcttgtactctttcatcagatcaccttctataaccctaaacgtgatcaagttcttatctggctccaccgcctcgatcctctccttcgccacctttgcctccccatctgtaccaataacatatcatatttataggttttaactaggtttgaaatgatctcctggttatatctatatgaaaaagatgaatataacattgacttgccatgtacgtaattccagaagacgatagagccgactgtgccccagtcgccttcgtgcagatcacatccctgaatgttgcctggacttgctttggagacatggtgtggtttcccagcgaacatgtggtgaaacttatcagccgaagccttgatctccacgtctgtctctagcttccccaccaaactagacgcctccgtcttcttcacctcatcttccatggggtgctttgttgctacgtcggccataactgctgctttgattttcttgaggaggtatagagagtgagttttcttggggcttcgatagccctataaatagagaaatgacccataaagattcattaagatttccacctaaaatcttatcttcatttaaatgcgtatttcttagcaaaaaataagatttagcaaaaaatcttcattaagattttgtttttgttaaccaaaataataatactgaattatttgcgtcctttcacgtcactcctttctctgttaacgtttatatgctcagatggatttattattgctagtggtgttttttaattttaaaatattaattgcctagaaaatattacagagaggaactcgtaggacaaataaaacttttaagctcgtttcgagagaccaaacatttggtaagaattgaattttgttagtccgtggaactggaacctcaatgtaaatgctcatgcagttgattgttacatccctaattaaccagatatgagtgtttgtagttgtcaatgaaatctacaagacatgcatgatgagagagaccagattgtttcggtcccaaagatctttacaaacgaatgttggggatcgcgattttccaatgtggaaaaaaaaagtgaagacataataactatttgtctaacaattgggaaaataatagagttgttacaaaattatgaaaagggaggtaaaacaaacgtcaactattgatgcacacacatgattaccattgttcgttaaatattattttctttgaagcacaccgtcattatgcacgcatagttatattttttttacgcttatataaacaatcgaattagatcaatgttgtctacaattcacaactttaattacaaaagaactaataacaaaatctctcattttttcttctttcatgtgaccgcgtccatagtccaactggaatttaccctggagctatacctccttacttatatcgatcgttcttataccattatttctgcggatatagaaaaatatttatttatagatagagtctaataattgggaaaataataatgagagtaacaaaatgccattttagatcattttggccttcatgctcacttttgtttttggtagactaggtgttgaaaatggtgtgatatgagtatgtcggtagacaacactcttcccaacactcgtataacttttgaaaattgtaaaatctttctctttaaaatcaatggattctcgattgaaaacttgaataacacattatcacacgtttatcttgagagaaaataggtaagatcgatacaattttcagtgacaactacaaacactcatatctgaatacgctaaacatgtgtgtgcatcaatagttacgttcttttggtctttttacgtctaatttggctaattaaatattgattctaactttgttttccatattagtatgctttattaacgagaataacgcgtttttcgaatttgttacatgaagcccccagaactcgctaatacaacaaaagactcaaacaaggaagcaaagaaatggatgattccaacattcatgatatcagaaatggatgattccaacattcaacattcatgatatcagagagacgagccttccacaaacatatctcacaagcttttattaaaaccaaacatgacatactcacatttagagtacaaagcttttatgtatcactcacatatattgggcaactctccttgtttattgtatcatacacaagaacatgcgtgcttcataacatacatatacacatatgatagatactcaattaaagagtactctctattcctcgttcaggagatgttcatcgatctctttggagacttccacacagaaatcaagaaaggtctcagggtgggccactttgtcgtcaattttctcatactcgacgtgccagtgcaccacactcccaggtcctcctctcttaggggtcacttggattgtgatcacaaagcttttatactcttttaataagtctccctctatcaccctaaaagtgatcaggtttttctccggctccactgcctcgatcctttcttttgccacctttgcctctccatctgcaccaaatatatttgtttgggtttgactaaaaaatcggtatgaatattaattcacaaaaatgttataaacataaaatttaattaatctatacttttgtcattacatatctgtggatttgattgtaagaatcgaataaatgttttttgtaatgaaatggggagccaaggatttatgacactgagatgtgcccttggccagaagttcacatcaagtatgcatttctgctcacttttttcattgataaaaatattaagtttaagaacatattctatgtagatattagaacttttttttccgataaaagttaatataactttgcacttgccatgaacataattccagaagacgatagagccgactttgccccagtcaccttcatgcagctcacaaccctgaattttccctggagttgctttggagacatggtgtggtctcccagcaaacatgtgatggaacttcccagctgaagctttgatttcaatatctgtctctagcttcccacacaaacttgacgactctctctttgctaaattcattgctgccccggccattttagtcgccatttttttcttctctttgtttaacttgaaaattaaaaggattttgagagaaaatgagtcccttttgagttctttagcctctttttgtagaggattgagggaggtaacggctgaagaagaaaacaaatcattattaattgcaattttgtatcccttctgatatcatgactctatctttttgtctcacctactgaatttttgtaatggataacggttgaattaggttttgatcatataaatgatctagagatcattcagtataacgcggtttaggttgtacgttccttctgcaaattctcgttttgacatatttgttattggcatgtagtgttgttgatctttaagaaaacatgcatgttacgcggttcatgtcgttcgttcatgaaggcacgtacagttctatgcaaaacaaatataacagtcattaactatgttattggataaacatgcttcaaccaaaaaaagttaatggataaatatgattagaatcaatatatggatttcttttttggcaattttcacaaatagcacaaaaataagttttgtttcacaaataacacacattttggaatgttccaaaatagcacaaatttagtgttaaaagattaaaatatccttaggaaattcttacttaattgttgaaaatatttagggttgtcttacttaattgttgaaaagcttcctaaataatatgtcttaaaacaatttatgaactagattcatcattgtatcaacaattaatgttattattggcaatgtgtaaagtgtgtgtataaattgtccacaaaacttgttttgatgctattttagggtatttctctttttcttttccattatatgtgtataaaatccgtaaaaaaaactgaaaaatggtatataaatattttgtaacatgcaactgtatctataaatgtagcaattaaatcatataaggttaaacaacttaattattaaaaaaaaatgaagaaacctcttgatgaagataattaaaggtttgtacagcccaaaccaatttctgctctagtttggatgtaactcatattccaacgttggttagattaacgatcttgtaacaaatttttgcaatgtattgattctaaactgggcctttaaaagggcttatgtatctcttctttctttttcaatttgaatacgaaaactttttagccaaaaaaaaagaaaagacgaggcttaagattttattaaaaaaacattttacactttattaaacaaacaaaacacattatacgtatacaaatttagagtatagcactttaaaaacatacaacatgactctcatatatccaacacaactctttatttttccacattcaaagagtgataaaaatcggcatgcttcaatcacacatacatgtacggacaggataatagatagtcacacgaggaatattctcctctattcctcggccaagagatgttcgtcgatttctttggagacttcgacggcaaactggaggagagtctcaggatgagccacctcctcgtttattttctcatactcgaagtgccaatgcaccacactccctgaacctccatgcttaggagtcacttggattgtgattacgaagctcttgtactctttcatcagatcaccttctataaccctgaacgtgatcaagtttttctctggatccaccgcctcaatcctctcctttgccacctttgcctccccatctgtaccaattatttaacatttcatctttataggttaactttgagacttgacatatatatcgtgactagagtggtctacgaatggaaattttgagattattttcttagacacatatgatctagtcacttcaaaataaacatttgtttgattttcttttttaaaaataaactggttagttatatatatatatatacatgaaaaatgtgtaataaaatattgacttgccatgaacgtagttccagaagacgatagagccgactgtgccccagtcaccttcgtgcagatcacagctctgaatgtttcctggagttgctttagagacatggtgtggtttcccggcgaacatgtgatggaacttctcagcggaagctttgatctccacctctgtctcaagtgtctctgttgtcttcacctcttcttcctcggataagagatgttcgtcgatctcttgggagacctcaacacagaattggaggagagtttcgggatgagctacctcgtcgctgattttctcatactcaaggtgccaatgcacaatacttccaggccctccatgcttaggggtcacctggatcgtgatcaaaaagctcttgtactctttcatcagatcaccttctataaccctaaacgtgatcaagttcttctccggctccaccgcctcgattctctccttcgccacctttgcctccccatctgcaccaattattttataatttgtaagtctgactttgagtttaatttgaaaataagttcaaaaatatattataagatataaaaaaaaaactttcatttgaggcaaaaaagaaaaaaaatatgtataaggttgacttaccgtgaacgtaattccagaagacgatagagccgacagtgccccagtcgccttcgtgcagatcacagctctgaatgttgcctggacttgctttggagacatggtgtggcttcccggcaaacatgtgatgaaactgtccagccgaagctttgatctccacttctgtctctagcttccccaccaaactaggagcttcagtttttgccattatcttggaaacagttagggttttgagagaggagtgaatactctacttagttctttagcctctatttgtagtggaatggttgagcaactgttgaagacattaagaattttattcattaaactaattttatgattagttgtgtttcatgtgattccgatcccatcattatgactcagccgtagaattatttgaattgttcataaaattatctaatcttttaattatttgaattatgatacacgacgtacgttgtaactttcgttttccctgtttctaagtctctgcttgtatatatgattttgttaagtggtagtaggttgttgctgacatacatttctattgtacttaaacatataattattgttaccatttcctcttttttatcacctaatgttaccatttcaaccttaaatgcaacgttacaaaacgattgaaataagaaaaagataaaatgacagtaaagaatatatagtgtttcacgctaaatatgatatatctttttttttcttttttcatcaaatatgatatatctatatatatatatatatatatatatatattgatatgaaaatattaaaacatgcaatagtatctaaaaatattagaaataaaaatgaatagttaaaacaactaaacctgtcgtcaaaaacaactcaaaacctgatttatcacttaacactttgattttcatcattatgcctatagtcttctactttgattattacagtataataatcacatggccttggccctttggttaatacaatgatgattaataatcttgagagaatcttttattcgcattatttagttgacaaaatctttatttgagccataatttgtgctgacttttcttcctttttggaggccaagcgagctaaatcgtacaagttacatatctttttcttatcttggtataaatgcttcattgaatctctcaatacaatatgatacgaaatggttcttaaatatatgaaggcagaaattgaagacgatgcttatttatcaaatcatatctcacctgctttttagtgttattaataactaacatacatgaaatacggtatagtccatttgactctgtcttttttactggagttcgactccactaactcccgttattccatatagtaagaattagttatgaattagatcttgtcaatttaaagatgtaaaataaaattaatctctatacaatgagataaaaattgggttcttaaatatttgcggctgaaagacaaggcctatatatattgtcttgttaaaaagtaaaaacacatgttttctaatacatatgtaagttctctttgattttggaatattgattcattcattgtcaattgatgattttggattgaacgtccataaatcttagcataaattttgagttatttcgtcacttttcaaaactaacaactttcacgatagtaaacaaacactcatgacacactcataatctttcttcatcaattcaaggctctttagtctttatttattgcactttcaaagactgaactataaagagcacacacacacacacacacacacatgtatagatacatgaggactcttcctctattcctctgaaaagagatgttcatcgatctctttggaaactttgattgcaaactggaggagagtttcagggtgagccacctcctcgttgattttctcatactcaaagtgccaatgtgcaacacttccaggttctccttccttaggggtcacctggaaggtgatcaagaagctcttgtactctttcattaggtcaccctctaacaccctatatgtggcccgattgttctccggatctattgactcaatcctctatttcactacttttgcctccccatctgatcaatataacgttgatgtatatttataggtatgagagtattagaaatcacacattgaaataagatgagaggatctaaagtaatatataaaacatatgagttaatccacccgtttcctatttattttgatttgaaaatcgatgaatcttataaaaatttatataaatagagaaaaatgaatttgacttgccatgaacgtaattccaaaagaggatagcaccaacttgtcccatttcgccttcatgcagctcacagccttgaaagttggatggagatacatcggagatattgtgtggcctcccaacaaacatgtcatgaaacttttctgtcgaagattttaggtctacggttgtctcaaggatcccaaccaaagtagatacttcctccgccattcttgatctcccactaagttctgtgtctcgtagggttttgcgttctgagagtaaatagtaaattggttccttctgatttctttagctccttttaagagaggaatgaatagagcgagaacaagactgaattttattttatggctaattgataataatattttgatcaagtcattctcctatgtgatcacattaaccatctgccgctaactgatgataaagcagaattaattgtttgatattttttaaagaaatgtcaaaactaaggctatatatagccatataaattatagtccgtagctcgtgtcatacaaaagattttgaaggagtatcagtatttcataagccaactgattcatgtactattcagtattttatatttctaaatcatccaaaaagatcgtatagcttttttgtcaactctatgagatcatatcttttgtaaatggaatacacgttatttcataattttaaatgatataataaacatatgtttatctgtttttgttttctcccgttgaggacttgccacaccacaatttgaaaaagatcgttttatctggccgtgtctcttgcaaaaatggtctgtttctttgtgcaattccggataagaattgggacggtacaaaagggacaatagaaatttttatttttaaaattaattttatgtatgtatatatgttctgaattgttaataaaaacaagaacattatgtaaatatgattttcttatatattaagtgtgaggttttatgattatttgttatttaacatttcatatctaaattaatagttatctattatgaaaccttttgattgagttttttggctcgttctatacccaaacattatttgatagcgtcactagataggttttttaattataaacaaaaatttgagaacaagagcataaaccaattgtatggccccaaagtttgactctggtgcatggattaaaaaaaagagttttttgtccacaaaaaaaaaacaagaaaaaactattttcaaaactttcacaatttttttttaaaatattttgtttttggaaatcttacaaatcaatctgaacaacacttggaaaaaagtcattacacttttggaaaacaaatgttttcaataatattcatggaaaaaaaagaaaataaaaaattggaaatggatgtggatggagataacttacagtcctacactacctcacaggccacagtttttgcctttgaataaaaaataaaaaccatcaattttctcaatcataaatatatctgccaggtgacatcccgacaatttgaaaaggtatttggtagtcgtcactatcggattattgataacttgagattaatgtactattatcaattgttaagtgtaattgcctagttgggtggaagttggttttatattattacccaaaaacccatgacaatcaaatcaatcaatttgatgaataatcttatagtttatcagcgagaactaacgactccaaatcaaattataataatagaattactagatatatgatctacatactatgtgtggctatgttttattgaaaatattaacatttttagatacataaaactgttttaaaatttaaacaatgaggtaactacaaaaaaaaaattagaaatttataatatagtttatgataaatactagataatttgatctatataagttccaaaaaaaaaacatataaaatgaaatataagctagataactattgtatcaatgacataatattgtatatttcttgtttggtaatcatattttaattatcgttatttgctcaagactaattattttttcattcaaactttgttccgcttattttgcaccatatgttatgtttgtccgtccatctaacactagccacatttatcaataattcaatatcatatttataccctcagagtttttttattcacataactttggtacatataacaattacacacatggcttagagagaagcaaataaaaccgttgttatataaacagaacaatatataaaacacatctaaaatcttaaattatctatgttttgagaagattagattcaatgtctttagtgagatagactgcaaaatccatgtatttgttcggagctggagaatctgcattaagcttctcgtattcccagctccatcttgctatacttctaccatgaagctttggtatgatctgaagattgcatgtgaaactactataattctccatcacatctccttcgaacacaaacacagtcattgatttgtttgcctcgtctatttcaactctctccttcattttctctacttttccatctgtaacacaaacccatgaagttaaattgatacatagagtagcttatagtaagttgagacacaagaagttatgtttttaccaacagacaaagtccagttcttggtgcctttacagccatcaccaatatgctcctccacgctaagtattttctctggagatagttttggtacgctacgtgaagtagacttgatagcttggaaaatgattttccgaaaatcatatcagctgatacattgatctccacttctatcatggatttcgccatctgagccatcacatctctgttgttgatcctttagtctcagtgtaactctgcttatataagtgaagtcttttggaggaagaatatgtaccatgcctagcattaacgtaggcttatatgaatagtttctttgttctcttcacatacaagactcatttggggaattgattcaccaagaatctgaacacaaaaacaggctttcacaactgtgacagaacttcacttaattcacattccaagcttcaggggaacactttagacgtgtcttttagcattctaaccgatgtgtacaacataccaataactgcaaaagtgcatttatgtatttgtcacatctgagctatgcatccactgatccacaattggttaaattgaaaaactagaaagatagattagaggagagagtttataaacttccacatgcaaggaacagttactaagcaaaatgccaaaatctagagcttaaggagtgaacaatcgcaaacccaagttccttactataacttcgataaaacccaaattcgagactaaatttattcccatgtgattaagcgcaaatacagaacagagatcaaagattgaaactttaaaactatttttagcgattccacacatctacgaacacacaaaaactaccaaaaacgtagtagaacttaccataaacgattgtaatgtcattggagaagaagtatgctcctcagtttcgtagaatcaaacaagatattccgccacagagctcgtttaccgtgataaagatttaaaatttagggtaagttcctattagagtgtgggcttccaacctaaaaccaattggctataggtggagaggcccatatcttatatatatcacttaagatcctactcaacatccgatgtgggacattgtccctaatagttccttcttctgaggggcaatgtcgttcgaaaagatcgaacaagggcttaaagcaacacgcttttcctcgtaatttgcgattcgagacgaggaaaaagagttgttgagagagaagagaaaggttttgtgaccgctacgaacttgaagatcgacatggcggatcaaaagatattatttaccagtaagataatgccacgtggaatattatcagacgctccacgtgttattatttaattcgcctgcagcccaaagcatgagaaatgtttttttttttaactttttcgattttgttgagaaatgaaagttgaacaaaattgaatggtgattttaataactgtgtttataataatcaatttaattgatttttctaaattttagtggtaaaaccaaaccttttttgaaacaaaattcttggtgagaaaaaaataatcctcgcttcaaattaagttcaaattaattacttcaaacgtagacgtatgaatacacgtacgtatgacacacaccaacagatatctcttacacgagctcgggcacgtgcggctcagtgtttattgcagtttcaaaaacttagttaagcagacgtgcttaagacgtcacacacacacacatatatagaatagatacatattgaatcttcctctattcctcggataagagatgttcatccatatctttagagacttcggttgccaactggaggagagtttcagggtgagccacctcctcgttaattttctcatactcaaagtgccaatgtgcaacacttccaggttctccttccttaggtgtcacttggaaggtcgtcacgaaactcgtgtactctttcaataaatcaccctctaccaccctgtacgtgatccgatttttctccggatccaatgactcgatcctttgtttcgccgactttgcctccccatctgcaccaaaattatcatttcacatatattttataggtttccaaaataagagaggatctaaggtaatctatattaaaacattatatgcatcttggaagccgatgaatcttgataaatatttatataaagaaagaaatataaagttgacttgccatgaacgtaattccagaggatgacggcgccaacttggcccatctcgccttcttgaagctcagcgctctgaatgttggatggagttgcattggacatatggtgtggtctcccgacaagcaggtcatggaacttctccaccgaagattttagctctacagttgtctcaacgatcccaaccaaactagatgcctcttccgccattctttttaccgatgatttgtattgtctctaagtgtttgagtttttgagagtaaatggctttccttctgagctcgtttgcctcctttaaatagaggaatgtgtaaaccgagaatagtactgaatattttttttttaccattattaataatagtttgatttgttctttctcctatgtggagtatggtcccgtttatccacctatagataactgatgaattgttcaatgtctaaacgaaggctatatacaatatagttcgtagctcgtgtcaaacaaaagattttgagggagtagcattagtgggaaagcagtaagataattagtagtatcaaattatgtgttaggtttcaaaaccagaaccaatgagttcataaagagtatgtattccttcactatttctggatagatacggagttctcgtttacacaattatttattttttaaatgatacggagtttagaagagtagtttaaagaagaaacctttgattggtattagcttggatttgaatgatcattgaatccatattaaacaaattatgagatttaaatattcaattacacgaggcattttgttctgtccgataatagttgttttttgttgataatcttcttgaaaagttcttactttgtggaatataaaactcctacaatacatgtattattgggtattttatatttttatataatatgtaaaatatcatatccttttttgtcaaccctaggagatcacatattttgtaaagtaatactgtaatacacgttattccataattttaattgataaaataaactatagtatgatgtatagttaggttgaataatatccagttcaaataatgttttgttttctgacccaaagagattgtgggttcagacttcagactcaaaatatcttggttatttaaaataaagaaaatagaacggagagaaaatttggaaatgtcatcctgctggcccattctatttggataagaaatgagaatatacaagatggtactatgaaatttatcattataggctatatttttactacacgcttcaaaacatcaaacagatggtacatattactaccctagatttgggttaacgaatcaacagcagtattatttcaaaaataaatatggagatatgtacatatccgagatccatttctgtttcacacatttctttagctactatgaaatttatgtagcgtttcttagttaatataaggtttacttgccaataatgtagttccagatgacaatagagccgagtttgccctagtcgccttcgtgtagatcacatccctgaattttgcctgaagttgcttttgatacatggtgtggtctctcgacgaacatgtgatggaactttccagccgaagctttgatctcaacttctgtctcaagcttccccactaaactaagacgcttcggccatgatttttgctttatctcaagaaaatataagtaaaggatttaaggggaggagagtgtttctcttcttgagttctttagcctcaatttgaagaggaatgagtgagaaagtattgaagaataattttacccaaaaaaaaggtgttaaagaatatatcgattttttgtttcttaaaatcatatcatgattagctttattttttttttttggtaaggatcatgattagctttaattagtagcaccatgtcatcacggtcccgttattataattcacctacccaatactttatttgacgtttaacctgccaaactatatggatattattgatcgatcacacaattcatgttgtttctttcactatcaagtttctcttcaaaataacacaaattaataataataaaaagcggtaatagatgaaaatacaatataagatcgagatatggttgtcggaaaaatgtcagcacaaaatagtatttgaaccaaaaatagaaaaataaaactttggatcgctagtttttatagtttgtatagcctttgaacaaagagtttttctcaagttcactacgagtcaaacacttgaaccaaaatagattatatgcttttactattccaacataactcaaccgtagtagtaggcatacacgcattacacacaccaacacatatatatatatctcttttctcttacataaagacggacccgttcattatttattgcagtttcaaagacttgcttaagtttcaaagacccacacacagacgaggagtatttttctattcctcggccaagagatgttcgtcgatctctttggagatctcgacacagaattggagaagggtttcgggatgagctacctcctcgctaattttctcatactccaggtgccagtgcgcaatactccctgactccccttgcttaggggtcacttggagtgtaaatgcgaagctcttgtactcattcatcagatcaccttctaaaaccttgaacgtgatcaggttcttctccggatccaccgcctcgatcttattcttccccactgttaactttccatctgcaccatttgttcaacattttacttccctaggtttaaatttacgaatcaacatgaatccactagttatgcaaaggaaaatatatataggatgtacttgccatgaacgtatttccagatgacgatagagccgactttgccccagtcgccttcgtgcagctcacatccatgaattttatctggagttgctttggagacatggtgtggtctctcggtaaacatgtgatggaactttttggccgaagctttgatctccacttctgtctcaagtttccccaccaaactagacgcttctgccatgatttttttgcttatcttaagaaaatattatgtaaggaatttaggagatgagtgtgttttctttttgagttatttagcctctatttgtagaagaatgagtgagaaagtattaaatgatagaaccatttttgatcgttaaaataatatcatgaatagtttcgggaccttatcataaattcataataaatcatgtttacaattatctgcgtcttatcttgatgatatgatattattgatcgatcatatttattcacatgggttcatttgcgtgaggcgttaccaaatatctcctcagcttatcaaaatttctttgtcgtgtgttgaaaatttcgtgagaataagaggttttctgatgtaaatgagcaagagttaccaatgtttttacaattagtacactctagtattaaaccccacaagaaaaatataattgaatccaagatgatagttttagcccaatagattaaagcccaccgaaagtggtagaggaggaatcaaggcacgattgtagtgggcctcgtgggaatgagagtagattatagactttatagttataaaactcttcaagatttgatgaacaattctgttgaaaacatacacaataactgtttttagagctgtagagaccattgcttacttttccaaaaacaaaaattgataactaatattggtttccttttgtgatatttgaagtattgtttcataagctattaatcatggttgaatgaaacaagatatcgttaagatcgaccgtgatgttagaatctgagtttgtcattcacaaataatttctgctacgctaaaaatcatatgatgttatcagtttatataaaagtcctggaatcagatagcagcacttttttttttttttggtcaaagagtcaagacatcacctgttgtatcattttgaaactgaatacagtaagtgtaacagtaatatactaatataaccgggggattaaatggtattcacaaaaataaaaataaaaaaattggctataacgtcccaatctcatctactttgaccgtaataattgacaaaaaaagaaaagtagggtgctaacatttattttattttaagcacagtgagctgtctaaacctacaaagtcaatgcctcaaaagaacattggccaatgtgtttcaccatcaaacataaacaactcatcgtcattaccaagaaaaaccctaattacaattattagtacgtccaaattcgtaattagtaaacaaaaagtgagatagaatggtaaagagaagagagtgctttcgaagactcttccctcgaataaactcaaagaggtgacagccgttattaatacctcctgccgtactttcttctacagaccacacacactctttttttgcttacgacttccgagacaaagagagaaagagagagaaaaagagaattcttgtaaaagcttttgccttttagaggaaagaatagtgccagatcttagaaggatccgaagacccatcagaaactttttacgagtcaataaatcttatttttacccacaagacaacaaacaaacttgcattccaaaaaaccacttcttcttcttcttctttctcctccttctctcttgtttttttcttcctttgactttcactgtctctttgtgactttgtcttcatgttcgtctgtttttggttactcctccggaacaaggttttgtgagatgactcacgtgttggtacgaagacagggacaaggaaagaagagaagatgggacgtgaatatgaccatgtgtttcttcttattcttcttcgtcttctatgtcagttttcagatagttttgtcgtcatcggcttctgttggttattctcgtcttcacctcgtcgcgtcgccgccgccgcctccgccgagaaaggctctgagatacagtacggcaccgtttcgtgggccattgagcagagatgatatttatggagacgacaagagagtagttcacacgggtcccaatcctctccacaactaacttttacgtgttgctattattatcacttacccccttcaccaacctacaagggctacaagcaaaacgcaagacgcaaacgtggaacgccaatcgcgatccgaaggtactctagtgtaaaatcgagtttgtcatagattttgaaagttggaatccttttgtttttgtctttatggagcatagaaacgattatattttaggtatttagggtagatttggttcgactatattgaactcttttaatgttagtattaagaatttaaagaatatacgccacttttgcctaacaactaaaggagagtaaactatctaaagataaaattgtgatgttgttaagtgttgcaacggttacaatgttgttgtgtttcatgtcacagaaaattatgatgtcttatatggtgtttaattaatgtttcaagaaaatgtgagatggtatgtggttttaatgttgaactctttaatgtcttatttgggtttagtgattgaaatttgtgaaggctagtgcagaagacgccctaaatcatctcatttggtgtgtaattttctaagaaatgagaaggtatggttttagtgtttggaatttgagaaggctagtacagaaaaaactatgaatcatctcatctgatgtgtaatgtttcaagaaacgagatggtatggttttggtgtttgaatttgagaaagtgcgtgcagaagaagctctgaatcatatttaactttccttcttcagcatctgccctcataattccacttttttctctttgctctcaacatatacctacccctactaattgagtaagtgtgaatagttttctctctcagatgactattagtctattactattaccatctttcatttaattgtttggtgtacttcaaaagtagagatttagatacaacaactactctgtaacaaaaaaaaagtaaagagaaaaaaaaaaagatgaatcaactgctctttttttttttttttttttttaactctagatgaatcaactgctcatgactaacaaatccatctacacatctccaaagtgtacaaaattttgtccatttcaaacatattttaatagtttttaccatctatactcaaattttacaattccatggcaaccatttacaactagtataaaccgtgggtctgtaagaataaggccaccacaaaatgttaatacgcaagacatcttcggattcagaccattttccattcgttatttaaaaaactaatgtatcagttaagtaagagtaaaaataggcagtatagtacaattggaccattagtcttttaaaatccactaaaatttaccatttgtagtaaacagtacacgtattaaaataagtttaccgccgcagctgataataaaaagagaggaaacaaaagaggatggaaaaaaagaagtgagaaatggatgtgaaaaaaaaagtttgcacataatcaaagtttgactttattcatatcatccatattttattatctaacttattttttataaatttgtcgtcattgatcactttatcttgcattttcttctacatgtttaacattttttttgttcaaacatgtttaacatttaaaactagttaatatgaaggaaataaacggattgagtgagtgatcagggttaatattatttgttataaaggacacatatggagaagagaaagaaatggtcaggcctcagggctgtgagtctgtaacactgtccatcttctttattgctcccatctgcctctcttctctaccttttccttctttattatatatattcctcacttttctccatcttcttaaatataggcattcccgtcaataaatgtgtataatctcgattagtgattcatttccgggttttaaacattggtaagatgttttttgcaaatccactacgaggaaaacatccaaccgaagtctaaatgaccaagtaatctatgggttgtgtttttgcacttgcacacaatgaaatcgaacatggttccgtagcaccttcagactttgaaaaatataaagaactacgtaattcaatagattgtctcaataatatagcaagacaaaatcggccgacaaacaaaataaagaagaaaacataggggaaacttgaatttcaaccaaggaagacccaaccacgtcagaaacaccttgggaatagtgtaactagatttaaatatttgtgcattacttcttactataccatcaacactcttataaatgtattaccacgacacataacggtcttaattatgatgcaccttttttagcactcccaaagattctctagctataagtatcggtcgaaagtattcattaatgcactatttgttttacctaagtttgaattcatttcataagaatgtgtgttcttaattaattttggcacactggtcgctcactagctattttcttctttgggcatagcatttagccttttagtatatatagaaactagttaatgttaagaaatggtgtttgatcattaatgatttagcaataacttgtatttataaccaaaaatgacaatttgtattctaagattttgtctttatctttttcagcaatgtatttgttttatctcatgtatatatatttttttgtgtgcacttgtgttctcttttgtgttttctcacattcttgtgtggatttttatttttttatttttgtgtggatttttttatattaacattccaattaaatttgattttctaagcagttctttttttttgggttaattttctagctacttaatcaattatcaaacattcttgataaattttaaaaacaaatctttgtttatgtacatgtatattaacttctcttttttactcgtgttggtatgaagagaaaacgatgtatgtaatgtgtacacggacaaaaactatagatcaagacatagcctataatgatttatgctagtgttgttgatgtgtcactatttaaaatttaaatcatgtgatatgtatatgtaggttcaaatttgaaagatatgtgacctaatcaatgtgagcatgtgatccaaacaaatgattagtacaactaatatttttcattttttggacaaactatataatttattttatgcatgatcaattttttgtatatatatttgcaactaccatagacatgtgaatccgaccacaattgttatcagacaggtcatgtatcacattggtgacagaaacaagactaagcccgtaaggtagcaacattgggctcaaccaaattcggcccatgaatttagactagagaaacagaaccggattaaaccggggattcggtacgaggagaaacagccgactgttgtagaaagaatatgccaaaagagtcaaagattcgtgactcatcatctctgtcgctgttccttttcttcttcttcttctcctttttttccaaacttttctctctgttacttacttccattattttcgagcttattcttatcttcatcgcttaaggttcgaattttcgaattcgatctctttttgtagctataccaatcacaaggtccgttctctactcaaatctcgcatattccttatgtcatcactgagctaaatcttttctgtattatgattcaatcgtgtctatgctttgtctctgtttctccggtaacctaattcgttgcaaaattaataattagatagaattcgaatctattgcatgcttaccagatcaattttggataaattgaatccagtaatttacgaaactcttggaacaattagtgttaatcctatgaattcttgttgttttaaacagttagagcaaatctaattatagatgacaggatcttaaaacgacttgtacctaatttctcaatctggcaaaacttaatttattagttagttgattagtgttttttttgtttccaaaattgcaatttattgttaatggtgaatgtttttattttcttgtggtgattgtagcagtagctgaaatcaatagtattaagccaggctagctagaccagcaagtaaatttgctggctagcaggatcctcatgagccctcagagcgtatcgaagactagcaaatcccttgagggtgtccatggggttcatgttgtatctcattctcatttcggatttgaaagtattggccaagtctctggctttgagtctgcggatgcaggaacaaagcagagacttttcattgagtaagttcattggttagggtgatgtctagttcaaagatgtatttggaaattagatgtttaattaagtgctctttcttttatcttctgtagacgtgtttggcaacaaagacctccatgcctaagacccatccattgcagcatccatggtactaatgctactgtgtgccttccatcttgttttcatctcagtgtgttgtttcgatcttttggtattcattacgatatctgactttgttgacaggtgatcagagtatcttagaaacagctgctaatgtgatcacatcgatccctttcattttcctcggtatgcaggcaccgaggtaatcatccttttcttgtctatctgatcgtatatatacagttttatgttctgtgaaacagataattgaatatggaagatatatttgcgactgtaggaaaaacctgaacatgaaggtatatgcaaactccttaatcggagttggaattgcatcgagtttgtatcattcttcaagagggaagtttaggaagtaccttagatgggctgattacacaatgatagctacagcgacaatagtaagtctttaatattactacttgcaagtaactatcaatagtacctctacttactatctgtttgtatatgtgacagtgtctaacgagggcgcttagagaagagaacccaaagttcttgatggctgcatcagctttggctctaccgtttcagcctctcgtggtatcagctgttcacactggaatgatggaggttctataagaaatctcaacttttctcactccatttaactaaacctcggtcgacgctaatctaacacaaatctctcaacttttgactcaggtagcatttgcgaaacgagccttagaggatccggatttgaaaatggctcatgatgtacacaagatgtcttcgttattaggcggagcattgttcatagctgatgatcttttccctgaaacaccattcattcacgccggttggcatctcgccgcagccattggcgttggaacttgcaataagcttcttcagtaatccacagtaccaactatattgagtgattgtggaactgccacattcttggcttaatgaaaccactagtacgtgtggtttcactaagctcataaatcagccgacataactagtagtagtcatctctatctttaaatcaatgtaaggaaccgaaacaagtcacctgttgtaatataaggacaaaggccactcgtctctatatattcgactttgaacaaccatgaagaaattgccgaattggagaagatcttgatgctaaattgctgatacaactttctaggtcgttatgggttttaattaggcccattgggctctgagtttataacgctgccgactatatccgcttggatccatgtggttaccaccgttgtttaattttctcataaaagggaaatagaagatttccttttttttggttttggttttcctaatcctaactcgtttaggttttgatatatctatatatatcgacacactgccattcttctttttcattaaatctcttcagtaattccatagaatgagtgagattgaagagctcgtgtgtattgaagcaagtgttacgcgcaaatctacatcaaacacggtggagatcagagaatcgcgtcgaaacaaggttactttaggatcaagcgattctcctgcgttcccgacccctcacctctttttgaaaaacatcgtgagctttgatgaacaaagcatgtataatcttctctatccaaggctccaagatcccaacttatgcagtattctctccttcaagatcgctttcgaagccaagcgagttccagggccgttgtacatctcctatgacgtcacattaaccccacaaatattcgaggaaccagacatggaaacatgcggtctttgcttgttggaggaacagcacttattcgacatgccaaattgtgcgcatgtgtttcatggtgattgtatcgataagtggttaagtacaagtaataattgccctctctgtggtgttgaaattatggatgacgacgagtgacgagcatcgtcatgaagaaacgattacgcattatgatattctgtattgaaacctatcacttgattttttaatatgttaatgggagaatgttcctaaacgagatgtactctccggtttggaaaggaactcatgaaattgtttgtgttaatctgcatactaacctaaatatctaagcataatcggataataaccttcacggcttcacatcatgtcgaaattgtgttatcagaatcaacaaagttgtgcgcgcgtatacaaacttgtgaggaatttggttcaattcgtaagaacaaacttattcatcagaaccggagaaaagacaacatatagttaaccggaccaaggtcggctagataaaacaaaagcaggtaatgagggcccagaagcactccacttaggatacaaaagccgtaaggcatggatatattggaggaaatgacccgtaaatatatgacatttgggtaatttgggtcatgcatgcccatcctaaccaatgataacgagttcattattacacaatccgtggaggatatgtgtataatatcatttaaaactatatattatcccaattaaaaaacgtcaagcttaatctcctttttttttaagttcaaaaacatcaagcttaatctaatatatatacagtaataataataaacatatgtatataatgttactaatattgatagatatctattaaagaattttgttaattattttattttttatataatctatagattcgaaactattagatttatatatttcttatttatagtttagatggtaaatgatttaagtttcagttattaaagatagctattgctttatttttaaatctacacggttttaatagatccatttaagtatagaccattgtcatttgtctaagattattgcatttgtaacgctcaacgcataacaatgctttgactacccgttattgtcccacacacggccattactaaaccccaaaatacaaattggcaaaacattattgtttgattatacgaatctgatttgacttaaacgacactagtcaaaccccttattttctttccaaatccaccaatcacacatatacacacacctctttaattaaaatctattcgtttttttttattccatcaacttaccactggccattatatttctcccttaaattttgttccttcgtatttgacctgcttgaaagattttttttttaataatcttttgtcgtgtttcatacttttaaatattttacatatttcgatatttctcttatgcttaattccttattccatattccacattccacgcttatcacaaaatctttctcctttgtctcgcttttttcttttgttctttcacatgtgtatatacacacagaacacacacttacatttctattatcatataaaacttcaactttaccttttatcttccaaaaaaaacactatcttcttcatcaaattctcttgattctgtttctttttatcctcctccatggccctctcacctaattcaagctctttagatttaacaatctcaattccgagcttctctccatctccttcacttggtaagatcatatccaaattaaagatttattaaatcttatatattatatagttttaatactatgtcttccaattaaaataatttggtaggtgatcatcacgggatgagagattttgacataaaccaaacaccaaagacggaagaagatcgtgagtggatgatcggtgcaacaccacatgtcaacgaagatgatagcaactcgggtggccggcggcgcaaaaagctccgtctaacgaaagaacaatcacatcttcttgaagagagtttcatacaaaaccataccttaacccctgtaagtatatattaatggctccgtctatgttttgcttacgttgaatagagaaataagaaagagaaaagagttaatcttttctgatgatcatgtcggctgatgatgttttgggtggctgattatgaaaccacagaagcaaaaaaaagatttggccacctttttgaagcttagtcaaaggcaagttgaggtgtggtttcaaaatcgaagagctcggtacgtatatatctacctcttcatatattacatcattcatacataaaattaaattcgtataaatcgaagaaaataagaattatatatcgtatgtttatatatatacggcatgttatgtatatatatatatatatatatatatagggtttttgaaaatatactttttactttttaagtggttgagaatattttaatatatgagagtgcgttgacagaatattatatctaaagagattgtgtcgtaacttagattctcaacataattcaccatatatacaattatagtttaggaaaatgtagtaaagtggaagtgatccttttttatccaagtgtttcacgttgattcccacatatatagctatcagttatcacccattttatgcgacacatgaaatcccgtactcttaatttatgtgcctacgtgtctatatataaatgtccaatgattcaaaaatcaaaatatagaatgtaataaatgtatcaacaagaaaaaagcgatagggaacatgagggacaaagttagagacaataaatgatctgtttattttttcagctcatctttggccagtccataattatgatgtttgtcccatagagtatacatataactttaatgaaacttaaacacactcatacactttttgtgaatgttttctctatattgtctatatattcacatacatctacacgaatgtgtgtaaatatatacatacatttgttaatgtataaatactaagatacatgtatatgcatggtagatagagttagttcattaagtccataaagaatggatctaattgcgttctatacataactctacaacgttataattttgattaatgaagtgtgaagagcctctataattttcaatatctatttttcagttcgtaaaagtatcgtagtagtgttattttcagtttttaattaatgccttaatggggccattttagtataattaaaaaaatacggaacctgcatgtgtgaaaaaatatcagaataatggacatttgaaacaaaagttactgtattagtacaagaagtagaactgtagacgtctagaacaatatgatatatcatatatgtcaagatgatcttcttcttacgtatgggcattccgggtcaattaagcaatcacttatatagtataacatgtgaacacatattacacacaggtttataaacttatagttatatgcaaaggtcagtagaatagtcttctaaaagtagaaatttatcaaacaccaaactcgttaatatattaataaaattggatatatatcaaacaccaacctatggatatatatggttgcattggttggtataggataaaacctataacttacgtatggtgtaagtatatcttgagactgatgcttcggcgaatgaaactaaaattatgcatggccacattaaccatcaatcatggttacacaaaatctgatgtatatataggagtaagctaaagcacacggaaatggaatgtgagtatctaaaaagatggttcggatcgttgaaggaacaaaatcgacggctacaaatagaagttgaagaactacgagcgctaaagccatcatcgacctcggctttaaccatgtgtcctcggtgtgaacgtgtgactgatgcagtagataatgactctaatgccgttcaagagggggcagttcttagcagccggtcacggatgacaatttcctcttcctcttccctctgttgactggtttggtcgaagtcaaaagtcaaaagataaacgcctgtttcggggtaaaaagcaaagatttgatgatgattaggaggattttgtgtatagtttgctaattatttattacaaatttacaaaccagtgaggaaaaaagataatttaattctcgatctttaattagctttttgtgttatttattcataattttatttttcgtgtttaaccaaaaaatagacaaaacaaatattgcttttcgtgtcccttcggattgagttgtactattgacttgaaaatagagctgttgattctgtgtaagaagacaaaattaaaatattggatgaaaaattcagaaatatatatatttatatttataaaaataaataggaaggagaaaatttataaaaatctaactaagaaatagcagcactagcaactaaagtttatttgatgcgcaaggagagattattaaaacatcaattaacgtcattgttatttgacttccacgagtctcaaataaggctgctaattattccatgacgtgaaaagcttataaaattgaattccgatggagaatttcacctacaaatcacctgatgtcttttccaaatgtatatatattttttttaataacgattccaagtacttgttgttattatttatttttttttttttgcgttttttgtgttgtaatggtttatagagaggaattcatatttattttcgacaacacagaacccttattcttaattcatgtagtattttttacgcgatgttaatatgtgaatagcttatagcatttatcttacattcaatataaataatactccaatactcgatcgtgaagatttcatttcatgtttgctaaaatcgactagttagttattcaaatctcctcaattgcttcaattcgtgtgacacgattactgtttgtggagctgttagcccattgggctttcttattaaattaattattgggcttataaaacccaaaaccgaattaaataaagttattaaaaagtgaagtcattttggtttattcaattccaatccacactctatcatccatatttttcagaaagttttttttttgggtggtacaaaattcaaaaagtattaaatgataacacgtatgtgtattcaaaattctaatattactcttggatttgtcaaaaagtgattcgtaacttaaacagagagcaaattttagggaaaaatcaatatctatgatcaaagtatatagtttagtccaaagatcagagtaaacagaggaatgtgtgttcgaattactgatcatgaaatggattatgtgactctggcattcccatgtgcttctcacgtgctttcattatggacaagacgcgtgcatgtcaaaatgtcccgcgctttttttctgacaatgtatatgtggactcgtctcattggtcagtgattcattattgtggtgaaccgaactagctgttgtgtggtaagtgagaaataagagactcattagtcattaattaaaagtttaaaacatacagttgaattacataaattataaaccatgaatcaggtccctgaagtaaaacatacaattgttgaaagggagaatcatattaaaaattcttgagaaggtttataaaaatggtatgtttagagggggaaaaaacaaacaaattactctatttgattcttaatcttgtaatttaaagaactcagaagtattttaaactgaataaaactgtaaattgttttttatatgaaaattagtggaccatatatcatacataatctattgtttttttacataaatgcattgtgttaccgttacttcaaattcatacattgcaatatacggaaaaacttttatagatgatatctctttacaaaacctaaaaataacactagaacgatacttttgcgacactgaaaaatattatcacatcatcattatgattacaaagatgattcagtcgtgtacgttataacatgtcgaaattcatggtcacaaatcacacccatctgtcattctctttcttggacttcctaaataacttttagcctttttcccagattatattcaataattgacgatcgataactttaaactattcattctttaagagtgagtaaattgaaaagtttatgaacatttcacattctttaatcacgtgtttaagccaccagtagccatcattgttcactttcaagattgtctaaatcgcttcgacgtaccacttcttttgaagaactggaatcaatattgatcgtccgaagttttaaccactcatttgatttgtatcaatatataactgccaaattcttatgtgttttagtgtttatttcatacggctaaaccgtatacttttgttcacgtgtatctttgattatttaaccacaaacataattttattgcatatagtgtgtttattaaatgatactgtactttagtttctgttttgtataatacttctttttctttacaataatattttagtactctattgaactcaaagtttgaccaaaattttagatgatatttttgtaacaattaaaagagggcacatttttaaacttagccataaacattttgagtcactcagtcatagccttatacgcacaacactgtgtgtactagctttattgtggaatatgtatatttttgtgtagatctttatgtacattagctagaattatcaattatataaacacttaaacagatggaataatttggtagttaatggaaatggttaagctgacatatgaagtgcttccaaaagttccctaaatcttttgccgatatctaggattatttattttgttaattgaatgtcaattgagtgaaaatattaagatataataataggttgattcgattatgataaatagttgaataaagtgtataatatggttttgtaaggacggcagattttatcttagcttaaatcacaattaatcattcatgtttggacttattcgaggaagttgtgtcaagtaatattttatgcaatcagaaagatacagcaacactaagtcacaagaaggtcacgacattctctgtctcagccatttactcatgtgaaactttggctctgtactaaaaaggtagtaatgcccatatcgggaaaaaaaattataagaataaaatacaggaaaatatttttttctactatataagtgatttaatgatatattaactaaatttatacaataaattgagctatttggttttgtaaaactcataaataaaaatgacatatattaactatactcataagtactacattgtgatgataatattttaaaactcaaatatcaaatcaataaatgtctaatatcaatttcattgataattcatttttgaattttatttctctattaatctatttaaaaagatatgtttaccgctagcctccaaccactagttagaggttaaccactgtagttctaatttcagttcatctcaatttttgttttggttaaaaagtttaaaccgatcatctctacactaaattcagattttagtttatgtgaacaaataattccgaagcgacgtgttaactaatatcatgaaggggaattagacagaagcttaacgatgagaatataggctaaaatttatgtcgtccaaggagtaattgagtgttgcctacttcacgagacaaataagtaaacctaacaataacacatagacacactcgacgccattagccaaattccatttgagccatccaattccttagtggatcttctttgtctccagcccatcttgtctccttatttttctaatgattactttataaaaagtgttttatcaaacatcacaaaatataaaaagaatttccaaatacttttgatatttaactattgcttttttgattattagccggggtaccaagatattagtttttaatttagtaatatacccatatgtttaatattgatatcgatattgatttattcatattacgaaaatggattagttagagaatgtgaaagaaaggtaaagtaaaatattgaaaagcaaagattaggggacagaagagaaaaggtatgtctctgccatgcccatccccaaaagtagagtgccacatgtagaccttcttcttaagatctaactcagatgctatttgtacaagtaaaaaatgtggcagactcagtttctatttttccatattttactttaatcttcatgaatcataaaaaatgaaaaatcaagcacatgaatgtcactgaaattattcaacaatattcttatttatcagttattttaattatttgactatttatgtgtatgttgttatctacaatatgtccgtttcaatcagtcgaacaaaaaatactagattttagttatgtagtataaaatataaaaatgttgaaaaacactctaaccattaatttgtattattttaaactttccatatgatgagatgtattattcaatataataataaaaagaatattatttaataattaaacaaaaacataataaatcttataaacaatatcttaaaagaaaagaactatattgttatttttttgataagatcgataaaaaatgtaacatactaaagaataaataaaataaaataaattagtaaaaaggaacttgggtggtcacgtatttgctgtataaagaggtgtaaagtggcatccttccttaaattatatcctcaaaaaccaaacttgctcactccacacacacactgctcccaagtcctctcacttcttcttcttcctccgacaccgttgcttaacggttttccatttttgtcccttcaagatgatctcatggcacgacctctacacggtcctcaccgccgtgattcctctctacgtggccatgatcctcgcttacggctctgtccggtggtggaaaatcttctcacccgaccaatgctccggaatcaaccgttttgtcgccatcttcgccgtccctctcctctcttttcacttcatctccaccaacaatccttacgcaatgaatctccggttcatcgccgccgacactctccaaaaaatcatcatgttgtcacttttagtcctatgggctaatttcactcgctccggtagcctcgagtggagcatcacaatcttttccctctccacacttcccaacactcttgttatggggattcctctcttgatcgccatgtatggcgaatactctggttccctcatggtccaaatcgtcgtcctccagtgtatcatctggtacacgcttctcctttttctcttcgagtttcgtggcgccaagatgctcatcatggagcagttccctgagacggctgcttccattgtttctttcaaagtcgaatccgacgtcgtttcgctcgacggccatgattttcttgagaccgatgcagagataggtgacgacgggaagcttcacgtcaccgtgagaaaatccaacgcttcacgtcgttcgttctgcggcccgaacatgactccacggccgtcaaatctcaccggagctgagatttatagtctcagcaccactcctagaggctctaatttcaaccactctgatttttacaacatgatgggtttccccggtggtcgtctctccaatttcggtccggcggatatgtactccgttcaatcatctagaggtccaactcctcgaccttcaaacttcgaggagaattgcgccatggcatcctccccgagattcgggtattaccctggaggaggagccgggtcttatccggctccgaatccagagttctcttcaaccaccacatctaccgccaataaaagcgtcaataaaaacccgaaagacgttaatacgaatcagcagacgactcttccaacgggcggcaagtcaaacagccatgacgccaaggagcttcacatgttcgtctggagctcaaacgggtcacccgtttcagaccgggcgggtcttaacgttttcggcggagcacctgacaacgatcaaggcggaagatctgaccaaggtgctaaagagatccgtatgttagtcccagatcaatctcacaacggcgagaccaaaggttagcaatctttagataactttcttgataagtcactgcaaattttctcaattctgttttgtgtggtgaatatagctgtagctcatccagcaagtggagatttcggaggagaacaacaatttagtttcgccggaaaagaagaagaagcagagagaccaaaagacgccgagaatggtctaaacaaacttgctccaaattccacggcggcgctacaatccaagacaggtctaggaggagccgaagcaagtcaacgaaaaaatatgcctccggcgagtgtgatgacaaggctgatactgataatggtttggaggaaactcatcagaaacccaaacacttactctagtctcattggacttatttgggctctcgtcgctttccggttagtaaatcaaaattaattgttttcttaactcgaaccaaccggttatcgggaaatttattccggtttttgaattgaaggtggcacgtggcaatgcccaaaatcattcaacaatctatctccattctatctgatgctggtcttggaatggcaatgtttagtttgggtaagtctttcttcgtactctgtttttattcctctcgaaattttagttttgaagccatttaaatgaataaatatgattcataccaaacgtcttacttgtcacggaaaatttctaaattttgcatatttcgttgacatattaactcatttacataacaatggaattaaattaggtagttcataaatttatatgctgtttttgtcattgtgatttatattatgaaaaacaaaaaattggggatggaccatccgacaggtggggctatgttgtgagtgtcttattagataaatggtaatggtggacgacatggtctcgtgttgttgatagtcgtcatggtccccatttttatgggactttattggatttattctagatatataaaattttattgattacctgattttgaaattaaactttatgtgaaataatcgtgaagggttgttcatggcgttgcaacccaaattaatcgcttgtgggaattcagtggcaacgtttgccatggcggttaggttccttacgggtccggccgtgatggcggttgctgctatagccatcggattacgtggtgatttactgcgtgtcgctatagttcaggtaaaattttctctctctttttttggttaaaactatttttggtgtaatatgaaaaatgtgaaaatgttttggtatggttttttaggccgcattacctcaaggaattgtgccctttgtgtttgcgaaggagtacaatgttcatcctgctattttaagtacagggtaagtcaaagattttatgataattattccattagcatatatgattactaatgcaatcctttcaataacatttaacattgtgataacttgaatgacttttcagggtaatatttggaatgcttatagcgcttccgatcacgctggtttactacattctactcgggttataagctttcggttatgaaagccccgagaaagagtcaattgtagagggagaaggaagaaagggaaactagagagtgtctcatggaacaaactaaaaaaagcttagagtatgtaagtacaactagggagtagcatgatttaaggaatgctgatgccaacattacaagccaagaaaccctttcttctcccatattttttatatatagaatattgggagattatttgagtgagacaatgggacgcagataaggaggagcaaaacatggggcaacgagacaaagaaaagataaataaaagattggaagatgaagacaacttattatttttgtaacttttatttttcttacacagtctttttttttttttttttgtgttctttgattaggttcgggtaactcttagttgattattgtgtagattttttttagcgaagaaaagtgtggttttgattttgaatattcccttgttccagtttcacatgagcaaataacgctttaaaagtaaacagtttatattattattcttaattagtactattgtgatcaaatttggtggctttactgattcttttctgctgtagtaaatgatgagagtcgtagtgggagaattgggttaggcgctttggcactgaaagcatttcgtgttatcattagtttaagctggtagtgatgtaattaatagtccatgtagtgtgtgtagggatgatgaacaataattatttaaaaacaaaaagataaagaaaaggcaaaaagataattaaaagtcaaaaaagctttgtctaaagtttaataaaaagctccttttcatttctttatttgttttctctctttcgaaattgattttttaagaaagtagagtatttttttttctgtcaacaaagtaaaaaatggatataagcaaattgactgaaaacgaccgtgtttagtttttattaatgtagtttatcagagttttccgccattttttctcgtgttgcgggccgatttttccttcctaatatttgaagtatagttaaccatgcgtttgttggatataaagtatgtttaacaatgaaatatttttgtgtttgcccccaattttttttttaattgtttttgtatttgagacaatggaatcttaattttatgtcatattagttttaattactaataaaatttaaactaaaaaatatagaagttttgcagattttgttgataaattaattaatctaagaaaacaccactctgattatgaaaacatgaaaagtattccaacttctttttttttggataaaatatggaatatttatactacttttgaaatttcgacataaattacaaaaaaatataagtagcggaacaattaaaatctacaaaaaaaattaacattaacaaaacgacgaagaacgacaaagaatcgaaacctgtggtttatacactcaatcctggcgtaaaacgataacagtattcagtattcactaatgagggtttaatatgattaagtaagtaattagtggataactcgttgattgggctccgagtaccaattgaatgtgttgtcgcattggatgggaacataatgggacgcaaatcgaaagaagtcttaaagccgttaatccaccgtcacgacctaaaaaactggtcggctaatctataattaaattgattatcaagattagcaagtgtctctatttaagaggtctcattagaccaacatgcgtcgcacaaaacctgtaatgggctccgtgcacctccatttcaatcagttagtataattataactctcgttgtttaattttagccaatggattttttgttattatcgaaaattcgtcacggaatcagaaacatttatcggtagcatcgttaattcgtttaagtattttggattctcgatagaaggggattgtctcggtgatatattatcgtgacaaaaatcgatgcatgttaattgaatctcctataaaattgtaaaatttttatttttatttttgtaagggagagcgaagtacacgtatatatgaatattgtgtgtagtttatggactatataagccatatgactaatatattaaaaaattatacaaactttatacgtaaactaaatataatttaaatgattttgtttcaaagagaacggtatttataatgtcagtttttcagatgaaaaatgtataatgcaaacagaaccactatcagttttcacatatcacaatcaaaatatggtaggtaacatgacatataacaaatatgaagacgggaaaaaatattgtcattttcgagcaagaaacatacatggaccaagatcggtttatagacttatagtacgtgtgagatactgagatgtgtgtttgaggagcaagttctgaaagaccatatgtacactaaacgcgctaatggttttcgaatattcgttgtttaatttcctataaagttcacaataaaacaatataacttgaacgtgtaagaaaactagtagtttttttttttttttttgcacaacatttataattactagtcattctcaaagagggaagggttacaaaagtaggagtctaatgtttgaaatgttcgaaagaccagaagcatcaaacaatttcttactttttatatatgtatgtaaagtcataattgaacgagttagttcgttatctacttatttacaaaaaaaaaatatacacaaattaatgttaactctcttaataacaataataaacaaatatgttcaaatcgatattctaacaccctcccgttcatacgtgatgataacatgtatgaaattgaagatgttgataaatgtattttaaatatttgattacatgtattttgaattgtttacatgtaatcaatcattttaaaactgattattattaatctatttttaatgggatagacaaaattaatcatttgtaaatactactataactttaattaatcttctatttttattattaaaaaaaaacccaacattttctcccgcatgagctggatagtccgcttaacatacgatttctattattattgagccggcgtttgtatcccacatgtgcataccctaagtaataatagctagtgtacattttagcaaaaagtgaataatctcaaagtatatatgaacgtttcttgcttgtttgcttctcttctacttgcacaggatgtctctatatattattatttagtattatccactgcccagtcttctcatgtgctcacaaattctcttcattggcaccatctgttacgtttatctccattggatttttcccgttataacattgctttccttgatttgatcaaattgggccatgcatgtaaacggctttggcataaactagaacgatccaccctacaacacgatgggcaaagcgtagggtagggacgtagtaaacacgaacgcataatccgttcattgaacgaacaaacctttgaagatgattaatgaaactagaatggaaaaaatggacgtggaatagataagagctatgtactatccaattgaatgcaaagacattcaattgaagtaacaaaaaatggaccctatcgaagaaagaaaaaaacaactgtgacttagttgtcccatatatgttgaaggcaatggatcgctagtcacattatacctgtcgaagaaaaagaaagaaaaaaaatatgtggatcacattttgcgaacgtagatccaaatagtctctttgtccctacacttttgaaactaatcatcccaacctccttaccataaatgtcatttttctctagttacaaaaatgtgcatcttacttcggattatgtaaatgaaaaaatgaagatttcgttaggtcaataagaaattctaaaaacagcaaaagagtactcagtaaaaattcgacgaaaatttaacacattattttattaaatgtacattttaagtatattcctttgatattcctacaaataaatatattaatatttaatatgttaaacaataagatagaattctaagataattgaccacatgtctataaataaatttgataaaatatattcatacatagaaaaatagcatgataccaagaaaaataacgtgtcttacaacactgagaggatacagataaacagtataaatgagatacctacgtaaaaaataacatgttacgaaaaatgatatgtatcgaaatagtcaaatgaaaaaatgaaaagataatcgtccaacatggtcaaaatccacttttatcatatgtgcaaaaaagtaatcaacgagtgataatatgctgatatttgttacaagaattcgaatatgagatatgtgtatattgacatattgtgctggatagataaattatattagggttaactttacaagcatattttccttatgattactaattttcacatatatagattttatatatgactatcagttagtcaaggatttttgtgagaataaggtaaatggagaactgaaagaagataactggggaaaagtttaatgagagggtatggtggtgtcctcgtgtgcgtggctgcattctcgtggcatgccatctcaatgctaataattgaaatccaatatataaaattcatgaatcaacaaaagcaaaattaaagagaaaagtaaacgtgaatagattgagagagagaaggacagatgaaggtgggtgtcggccgaaccacggacaccggtcggagtctcaagacaaaggaaggtttgcgtctggggaccattcacactacctcaatacaacacccatgccaactccaaatccattcttaattctttttattttcagtaaccaaaacataaatctactaatatcatttaatggaactaatttagtttaaagctttttttaatgttgctaatgaaataagcaccttaagtatattctcccattggtgatatgttttcttatcggttggtttgggtaattttcgacacttttggaaaatggacaacccatgttgtcatttccctttagattttcttgatggttatggtgtggctagtttttttttttcttattttcttatttttggtatttaagaagagaattataaaggaaagagaaataagtgtatagtttaaaaggaaaaaaaacaaaggaatgtaaaggcaaatacaagtgtatcccggcattagtttggttttgcgtacttgttgttgtgagcttcatgttctttagcgacttttcgtcacgttatctttggttcccttcacttattttttcaatgtaccatttgataatacatattttttcgttgtttctgaaatgcaacgtataatcttggcgtgattttacatatttttaaagaatacacgatgaacaacaataacatgaaacaaatgtctaagattatactctcccggaggagaacatgcattcacccatcctaatcctatgaaacagttattttacgttttgaccattgactctagagtagcagctgtattaaaatctggtacaaagagatttcacgacacattttaatgcatggcatcagatggatgccatttatgtcgcatacgctacccaaatatgcacaccatcaattaggctacatagggccataggatcgcatgcccaacaaggtcagacaaaccaacatcaaagtctacgtactaactttgcagcagcaggcgaatccaacccaaagaccaacaagtatcaagatccaaatcatgtaacctctataaacatctccttaaggaaagcaaatcttgcagttcttcaacaataacggccagtttaagctaaaacaatgaaaccatgagagtgctcactattcgagatgaactatacaagaattaatgtctcgatgttaatagtatattatctacgatcacaagtaagaaagctaacttgaataaagcaaggattcatccgcgtttgcttagaagtcttatctcgagttctagcctcattcccatcgttttgcctttaccttctcaaatgcattcatcttgttgatcctgaaaaactatatccttcagatacgaaaatgaacaacaaaggtttttgctttaatgcttaaaacctaatttatgtttgccatgtccttggtcatttccttttctctccatttgccatcctctccaatcaccttcttcaaatcttttaggctcctaaaaccatcaacgttgatgcatgatgataataaaggcaaactcaaatatcgcaaatttgcaactgatattagcacacatttttgcagtacatagactatatttgtattaattactctctattcccaaatttgttacacaatctctttcgattcttccaaaatttgttctgctttgacttctttttatttttttgataaacatgtgaagattcataccaattttaaagtttctacagagtacagagattcaacgaaaaaagcagaaagcagaaatctacaatctgctttgaccagctttgctttcataatttttactgtacagagaataataaccaacctaaatcagaattcaatatttcctctaccaacaaaaaagataaaccctgaaacgttttgtaagagaatcacgtgagagaccacgtgaccatttttttccctaagcatcgttaatcttaatgggctcaagaaaagtttcttaattggatcttattataatactgttgagtgagccttagtccattattatgacgtggcataaccctgccactttcagggtatcgatccacatctgccgttaaaacagtaaaccgccgtctaaactttatagcaaagaatctggaccgttgataaacccctaaataaacgggaggactgataacggagaacgtgagcatcctctgacaagaaaaagacaaaaaaagaagaagaaaaaaagcacatgacatgattctttcaccaccctttcgtcttccactctcatcaatctagattctcttctctcttctctatattccaaagcttttacatttcttcaaatcttattttccttgagatcaattatggcaggagagattcaggacccgtttagtcttagttttcaggtaaattcttctactacaatgtcacacttttacttgtttttcttctaactcttttcataattgctcttgacgaatcttggtaaattatgtatgttcgttttaagatcaatctaaatggacttgaaattctactgttttcagctttacttcaacgaaatttgctaaatttaaccgcttagtagcatgtatgcagagtagtgcttcatgtcttgggaaaaaagtcaattgctaggtcacattttgttagatttgtgtattcagtttgattaatgtgtttaagaaatgctaggtcttaaatttatttaatgtttattgtggagcactcaaatgaacataggcaagactctgaatgtatgtaatacgttttagcattgttcttattggtttgatgaatacaaactacaggggaactctatccactctggatcgatatcctttggaagattcgagaaagagggtttatcatgggagaagaggtcatctttttctcacaataggtatcttgaagaagttgacaagtgttctaaacctggctctgttactgagatgaaagcacattttgaagctcatttcaagaagaaaggaatccgatttccagcttctcttgaatctcaaacttggggagttcatcaaacaagtaatgagcctgatgatgaagctgttcatgctactgaaagtttcgaggattatcgatctgatgggagtttctcggaggatactagtcaatcgaatagtgtttgtaactatagccatgaacaagagaaatgtggtcaaggaaagagtcaatgtgagtttgatgaggaaagtgatcattgtgttagctatgatgagattctagtgaattctgatgaagttattgagcttgatgaagaagaaggcggtggtgaccacgggagggttgctgatcttgttgagtgtgagaatcttggacctcctgagatgccacaagagattgtgattcaagattctgctttagttgaagaggcgggatcgaaactcgatgaacatgcttcaaaaaaggtgagagtataccttgttggcttttgcattgtgacaaattcaaaaatctaaacttaaatgtgtttcttggtctattcatagccatctaattctatggaaacaccctcctcctctgtaaacgtgaaacctattattcctaatgatgtgcgtgtgactaaagcttctacaaagggacatgatgtaacgccaaaagctgcttcaaggaggacaaagggttcttctttaagttctaattctaaaaccaatgtagatgccaagaggtattttactgttctttctatagagaattgttgcaactctgtttcatctttctctttgcttaagagttaagacctattggttttgtgaattgtgatagccaaaaggaactaagaccgaagaaaaccattgagtctcaacctaaatcatcgaacaaaaccgagactcgacctcctattgctacgaacaggttcgatactaagactactctagttttttttagataatcgacttcaacaatcaaatggtttcaccatgcaggtgcaagactagtaccacttcttctaagctggagatgagtacaggttctactagtttccgtttcaaatgtagcgaacgagctgagaagagaaaagaggtcttctttcttttcaaaataatagcattgtatccctttgttgtttctaagcatcttatgagttttgttttcaattcagttctatatgaaactggaggagaaaatacatgctaagaaaacagaaacaaaccaagttcaggccaaaacacaggtaacatcatcatcatctccatgtctctttgaaaatgtaaaacatgtcatgtcttttacatgtcgaaatgagctaattggattggatcaacatttcggatgcagcaaaaggcagaagctgagattaaacagttcaggaaaagcctcaattttaaggcaacaccaatgccttcattctacaacatcggtactagaccggtgtctcataacaaggtatgtttctactattgcaagctttgtctgaacacaaaataaggagcctctcaactctcaagtgtccatcgactagtctacatgtagttagaatctcaatcggtcactataattatatctttcaaacgctaagaaagtagaagccatcaacttaatactctataacttgttttctctaaatattttcagaccgagccatctaaagtagcacaatcaagatcacgaccagcgacctcagcctcaattacaaacagggcggtcaccagagtttcttataaacacggttttgaagaagctgaaatggtaaaggtaatggtcagtaatagaaaacagagtgcggctaaagattcagatttgcaaaagggtaatcttatggcggttgaaatgaaacaacagattggtgctcgaagaagcagaaactagacagaggcaatttgaattctgcggttggctgcatagctttctattgcgattagtactttaaccaataagaaaactatgaatagtatagtacttaataataacattacatccgctgtcaaaaaaataaaaaaataacaacattacatccatttatttcatttttaaaaatcataagttcataacgtaaaccaaacaatcatcaacaaataaccgggtaaaaataatggaatttaagagagtggaaagaaagaaacctctctttcaagtttcaacagttaaagtgaaaactgaaaacttgtagatgagtagatgtgtacatggaaccaaaaccttgcaagtcatgcttggcaacaaatcgctctgctaatttagacataaaaatcagtaagtttgacgtgtgagtcgtgacatctttttctcatgcaattacacatcattacttaaagcgaaaaactttttgaaaagaaattaaggtgctaatattgtgacgtgtgatttaattgtattcaaagaattaaactactaaaccgtgtacaatggaagcaaatctgtcactttcatgtttggtatccaataatctctataaataaattagcatgttttgacgtgtgacatctttttctcatgcagtagacagtagttacaaataattaaacaatgtgaatttttttcgtccatattatgacgtgtgattcagttatattcgatgaattaaactactaaaatgtcaaattcatgtttgatatcctatactctctattctaattggctcataattttagtatagtgtttaacgtgtagtggaagtgaaacatatctccttttgttttttacatgtaagcaatgaaataaaattagattaaaattctacgcgttacaagactcaacaagttaaactaaagtcacctgctcacaacaaactcttgagattttctataaatacttcacatccctgcttttgtctccaacacaaaaaaaaaaaaaaaaatcattagagaagaagaaaaaaaatggtgaacacaagtttcgaaacacttcctagacatatgcaaatggagattctgtcacgggtgcctctgaaatttttaatgaaattcatgtgcgtctcaaagaaatgggcatctatcattcgtggggaagaattcagagaagattacttgttccaatcaatgaaaaggcctcgagtgttgttcgtcatcgatcatagagaatacctccctatcaaacccgaagcgttctttcactctgtttatcaagaagatcaaccattgttgttgtctggtaaacagcgtatgcgtacattcgaaacaccacttgttcaagtttttcaacccatccgtggtttgatctgtcaacaaggatatggtaagattgtgatttgcaatccgggtttaaaaaagtttcggagtttaccgcagatcaaagttcataaaggagcacccatgagaactttttttggatacgatgaagataaggatgtattcaaggtgttatgtataacatggctccgaaatggtaagcgatcagaagtaagtaaggaatatcttgtatacacgatgggatcggatgaagaatcttcttcttggaggctgatcacatgtgagcatgaccatgcaccagttaccgaaggactttttaaaggaggagtgttgtactatggagctaaatccaataatggcaaatcagtggtaatgagcttcaacgtgaattctgaagattttagtgtcattgagttggaagtcgaaattagtccttattggagattggtgaattacaagggggatattgccctaatgaacaacattgaggatagcttgtatcacagtcgagaatttgaaatgtgggttaggaacgaggttactggaaattgggacagaactagcattaagatttctcattggaatggaactgttgatggtaagacgttttatttcaaaggtactattggaacaaaagaacttgctttcgcaccagactattggtttggggaacaacattttgtgtcgtattacgatacagaaacaaagaacctcagaagatttgatattgaaggaatggttgatcaagatgattttgttcgaaccttctttgatcatgttgatagtacttggcttatatgaagaatacaaggtggtccactgattattagaaactcgttggttattcaatctctctagtcttaatggaattgttagtcttcatctcattaatctttatttatgctaaataataatgttgtctctcaagtagtatttgtgatcttatggaattgtgtcgttttcatttgtatcgttgttaatctttattttattctaaatataattaactttaataacgtttctatactctgtttctcaagctgtgagagccttttttatgaaacagagttattcaacttttgggttagtttcactcaaccaaagagttgtaggttttatcatttaatggagaatgaactaatccaacttttatctatttgttgatgtagaatttcctcaattatttcttttgctaatcgtaattattatagaaaaattaacaaatataagaagtgattaaaaaaaacactgaacaaatgtttcaattaaatcctcttttttggaaaatgcatagccacaatttccacaagctagagcatatactcttatatagtgtaacataaaagttttaactatagaaagttaaaattataccataaacaaaacgttaccaagaaaaaaaaaacataagtaccgaaagaagattttccacagttacgatcttgaccgttgatttcacagaaggtgatgtctgaaccgtctgatacggaaagtgtccaccgactagtcttcaaacaccataaaaagtagcagccaataacttaatactctaaaaacttgctttctctctagatatttcagaccgagccgactaaagtagcaccatcatcctctgcttttgtttagcgttctcttaaactgaaatgtgtgactctgctaagaaaactatgagtagtaaagttaataataacattacatcaattcatttcattttaaaatcattacgtaaaccaaacaatgctcaaaaagtaacccggcaagtaattaagttgttgtttttttttgccaaagtagtggcaagtaagtttctacgtaaaacctctctttcaagtttcaagaattgcttttcaaagaattaaagtgaaaactgaaaacttgttgatgagtagatgtgtacgtggaaaaaaacctttcaagtcattcttggcaccaaatctctctgctaatttagtcattaaaatcagtaagtttaacgtgtgacacatttcttttcatgcaattacaaataattgaagtgagaaacttttttgaaagaagtacttaattattcgaaggtgttatctatataattaatgacgtgtgattcaattgtattcgaagaactaaactactaaaccgtacaatgaaagcaaatctgttactttcatgcctggtggtatccaataatttctacgctagtttgtcataaatattagcaagtctttacgtgcgatatctttttcccccatgcagttacagataattattaatgtgaattttaccatatatattttgacgtgtaatcttcaactgtattcgaaggattaaagtactaaaccgtgtgtaccatgaaagcaaatctgtcactctcaggcttggtatccaacaatctctttggccagtaatttaagtaaagtttttaacgtgcgtgtggaaccgaaatttctcctttcgttttttagatctaagcatgaatggttaaacaaaataaaagaaacgtaaagattgatggtgttacaaaactcaacaagttaaacttaaaagtcaactactcacaatgttggtaacaacaaactcttgagattttatagaaatatattacatatctgtgctataatttggtctccaacacatattatcattagaggagaacaaaaaaaatggacaacctccctatcaacaatattatgttcaatgaattaaagtgaaaactgaaaaccttttaaaaagtaaatcgtgtttgtataactaaaatgattttctggattgacgactaagatgtatacgatgaaagaaacgtttttaagtcatccgatccctttcataaatatcagcaagttttgacgtatgacaattttttattgttcatgtaattacaaacaattaaagtgggatcgttttaccaaattttgtttttactaaaacgtgtatgctgacagaaaatctgtcaatgtaatacttgtattcgaataattaaactactaaaacgtgtacattgaaagagaatatgttttactttcatgctggtatccaataatctctatggtaattggtcggtaattttagtaagtttttaacgtgtggaactaatttaacatttcttcctttggttttagaagtaaagcatgaattataagttaaagatataggcgttttgcgactcaacaagtaatcacccactcacagcattagtaacaaactctgagattcttctctataaatatcacttgtgtgtgttcaagttaaagaagaagaaaatggagaataagaaagaaaagaaaagaaaaagaaaaatggagaattcaagttccgaaacacttcatgttgaagatttacaaacggagataatgtcatggctgcctctgaaaagcttgttgagattcgtcatcgtctcaaagaaatgggcatctattatccgtggagaacaattcaaagctctttacttgcgtcgatcgatgacaaggcctcggctgatgttcatggtccgacgaattgcaaccctaccacccgaacctgagatggtgtggtttcagtctttttgtaaagaggaaagatgtattcccggccaactcgaagttgagttcttgtttcactctgtttatcaagaaaagataccgtatttttcatctggtcaacagcagttgcgtgttcctcctaatacaaactatacgtctgtttctcaacccatcggaggtttgatctgtcttcagtcagaaactaagtttgcgctttgcaatccgggtacgaaaaagtctcgggctttacctgatatccaagcacatgaaaaagcttttataacaagttttttaggatacgatgaagctacgaacgtattcaaggtgttatgtttgacgatggtatgggcccatgaaccatcaaaacgagtttatgagtatcaagtcttgacggtggaatccggtgtagagtcttgttcttggagagggatcacatgtaaggagaaggatcacacaccagaaactcaaggactatgtaaaggaggggttttgtactatggagctcggtccactagtgaccatcgacctctggtaatgagctttaatgtgaggtctcaagagtttaccgccattgaacttcctgatcaactacatattagttatttttggaattttgtgatttacaatggggatattgccttagtgaacgaatctgactttgaccctagagttgtgaatgaaccgaatgggaataaagtttttcacatatgggttagggatgcaactgcacaagaatggcagagaacccgcatcgagattcctcgttgggaacaaaatgttggacatgtggactatgttttcagaggtaccactggaacaaaagaacttgttttcgcccaagactctcgccattgcgaagatgatttctttgtgttgtattacgatacattcacaaaagatctcagaagatttcagattggagtgactggccctaaaatttctgttcgaacctgcttggatcatgttgatagcctttggcttatgtgaagaccaagatctcagtctctcttcttgatttatgctaaatattaatgttgtctctatagtagtaatatcttattttagttttcatttcattaatctttatttatgctaaataataatgttgtttctcaagtagtgctatcttattgccattgggatggtttgttttcatttctactgtcgtttatctttatttatgctaaaataataatatgtttgttctattcagattataacttcaataacatttctaatttctatatatatatactcactatttctcaagctctgagagccttttcatgaaaccaagggggttccattccaaaaataaaaaagaattgagtacagaacaacgttgtaagatatgcaagaataaagcatggaagcaaatattagccagaaagatcaacccagagtcgagatgaaaaaaatgttccaagtaagaaatcaaacattcatatataatacttgttcagataatcaatagaaacaatggtaagaaaaagtaccatataaagtctctcaatcttcgctataacagagttaagacgattaggatgaggtttaattcaccatttcattctctgtttgtgccccctgcatttgatatatagcaaaatcattagacaatgataaatatccacattgaaatcactatacagctttagttttgtttcagtttcaagagttagtttattgaaaccctagctccaaactcaatgtcaagaaataaattttccaatttcagctctcggaatgatacaatacaaaaattgttctaacagagacagagaaatgaatacgtgagaatatgcatgtagcagctaagaactcaccgcaccggtgcaaggcgaaactcgaggttaggaagccgaaacgaacaagccgccgttttccttgctagcctcatccataagcttcttccatgatacgagcgtggtggtctcctattggagaagttcgactttaagtactttccgatcaccggcagtcaatatctctgacgagattttacacgattcgccgaaagttggaccgtcatcggttgggaccgggtcagagttagactctgtagagacccgaatcggagaggaagtgaaggcccatgaataagcccatacaattacaattccaaggaaaagaagtatacaaagacacgttttggagctgcgtaaactgtccccataatcctttgccatcaacaacttcgattccggggactacaagcctctgtcttctctctcgtttagggttttattccaaaattccgtgcttcgatcccgaagatcagaaaaaatgggtgatgagattgtgcctccggcgaatcagttagccgccgataacttggaaaacgatggatctacggtgcagaaagcgcaattttcagacagggttctgattcgatcgattttgggcggcggagctaaactcgccggtcaaaaggttagaatcggtggttgggttaaaaccggaagacagcaagggaaagggacttttgctttccttgaggttaacgatgggtcttgtccagcgaatctccaggttatggttgattcatctctttatgatctctctaggttggttgcgactggaacttgtgttactgttgatggagttttgaagattcctccggaaggtaaaggtttgaagcagagtattgagcttagcgttgagacggtgattgcggtgggaactgttgatccgactacgtatccgcttcctaagactaagttgactcctgagtttctcagagatgtgcttcatcttcgttctaggactaacttgatctcagcagttgcaagaatccgtaacgcgcttgcttttgcgacgcatagtttttttcaagaacatagtttcctttacattcacactcctatcatcacaacaagtgattgtgaaggtgctggtgaaatgttccaagtgacaaccttgatcaatcacactgagagggttgagcaggatctcattgataaccctccaccaactgaggctgacgttgaagcggccaggcttattgtcaaggagagaggtgaagctgttgcgcaacttaaagttgccaaggcgagcaaggaagagatcactgcttccgttgctcaactaagtgtagcaaaggcgagtttagctcatgttgaagagaggttaaggcttaagcctggactacctaagaatgatggtaaaattgattattccaatgatttctttggccgtcaagctttcttgacagtttctggtcagttacaagtggagacctatgcttgcgctcttagcagcgtgtatacatttggtcccacttttcgggcagagaactctcacacttcaaggcatttagctgagttctggatggttgagcctgaaattgcttttgcagatatacatgtaataaacatagagataatatcctttggtttcttctttatcgtaacatagtgtatcttagaaacattctttgaaatttgtgtaggacgacatgaactgtgcagaggcgtatgtgaaatacatgtgcaaatggttgatggataaatgtggcgatgacatggaacttatggataagaacgtcgacgagggatgcactaaaaggctaaacatggttgccaaagcctcgtttaagcgtgtaacatacactgaagcaatagagcgacttgagaaagctgtagctcaaggaaaggttgtttttgataacaaagtggagtggggaatcgacttggcctcagagcatgaaaggtttgtctattcctcaacttcaaacacttgcaagaaatggttagttggtaaccaaacttgtcttgcaattactacagatacttgacagaggttgagtttgatcaaaagccaataattgtgtataactacccgaaaggaatcaaagctttttacatgagacttaacgatgatgagaagacagttgctgccatggatgtccttgttccaaaggtaataaataaataaaactcatcatcttgttataataacgatgatgggaggaatattttcgttatatttgttttctttgtatatatatattaattaggttggagaactcattggtggaagccaaagggaagaacgatatgatgttatcaaacagaggtatgtgaaagtgaaaccaatattcattttttggcttctgttttgtgatgaagcaatatctgtctggtgttataataataggatcgaggagatgggtctaccaatggagccatatgagtggtacctagacttgcgtcgttatggaacagtgaagcattgtggatttggacttggcttcgaacgtatgattcagttcgctacaggaattgataacatcagagatgttattcctttccctcgctatcctggaaaagctgatctctgattcctctctagacacacaattctggtctggtctcgacatggttttagtttccttttaaattggttaaatgaaaattgtattgatttttatctatactctgtttctcaagctgtgagagctaatatgaagggaaacaaagttatatgaagggaaacaaagttatacttttgggttagcttcactaaaccaaagagtcgtaacatttgtcatttaatagaggatgaactaatccaactttgtttgcactaaagactgtttacacacttgagagactagaaattactcaactatttttttcctcctcgcaatttttatagaaagattaacaaacataaaagtttcaaccatagaaagttacaattatcccataaacaaaacgttaccaagaaaataacataagtaccgcaagaagatttgccactgttacgatcttgacagttgatttcatggaagatgatgactgatccgtctgatgaggaggttttctgtagtagaacgggaaataaggcaagatagggtccggcggtggaggaccgttatatcccccgctgggattacctccgtaataaggtggagaagggtaattcggtacattactcgacgatggaggaggatagtaaccggtcggttgaggataataaccggccggttgagtggagccagtaccggctattggcaacgggttacaagggtacggacatggcgtctgtgatattgttatgaaggggaacataacaagagaaaacacgaacaatagacttatgaggtgaccgtaacgtttattcatggccaattttttatgaaagattttgtttaatggtaaacaagaaaatatatgtttgtgtaagagaaagagagaagattttcgagactttctttcttcttgagtctgagtggaaatcagtaagtgagtggcttttaaaataagttgtttcatgtgagttaagacaaacgactagtgatgaatatattgaataatgacgactaacaagggcattgagattgaacgtgtcttgtggctacgatacacttgttgtcttgtaaattatgatacttggctgtataatttcgtccttctttaaccaaattgggccaccgcttgatataattaaaaaaattcaggtttggttccgagatcagaattattcgacgattgaatatctatgtttgtagaatgttttttttctttttcgagttattattattagagatagctagcttcttactggaaaccatagactaaagtttttatttgtcagcaaaagtagtctacaattaactgtaccacgatgaacctctagttatatatctcatgaaaacccctaaaattgatggctttattaatggtacagttcggtaagtagccaatcgttgtctggttttccacccatatggccatgtagatactttagagaaaaaaaacaataacattcattaaattacttaaatgtttaacaaatatgatagaaaattttgtttataataaaaattggcagtgtattgatttttgacgaatttcgatattgtttggtagctgataaagtgataatgttcagttattcagtataactccagttcagagaatttaaagtcacatgtttgtttctttgaaaggctatataaatagaaggattttaaaggattatcaaatgccagttttaaaatacctttttacagtgtgtagtcgtttcgttttactgtctatagtcgttatgtaatatctttaacagtactaacacttaaagatatccactgataattgatttataggtttaataacaaaatcatgactactaagctactatcctcttttcttttgtcacctatactgatctaccatcatgttagaaaatatttgatattcatcagtgcactttatggctatctttttatattgacgtccactatattgtcttggagagttaccaaatgctttattctctttgttatggctccattctgaaaaacctataaatattaactaaagatcacaggaatattttttcccatgtcgtgaaaaaaagccacatcattcatcatatatcatatctgtatgtgcatagccagccatagagaagggagcttctatgcaatcactagctagatgataaaagcttataactaggtacaggctgtgatttgctctattatttcccactttatcaaagtatacaaaattagaaagcctttggatactgataataatttcttgattcttggtttttcttcatcctttatactcttacggaaaaatgtaaagcagggatgtgataacacaaaaataaagttaggttcaaattttgattgtctaatcaaaattttcattatagataatattaacgatcaactccaaattttgaacgaccatatagaaaatcctaaaaactacgagatattaaagaacaattatcgatgtaaagaaaaaaatttagcaggcgtaaaaaaaaagagagggacaattagcataattccaaaatttaaaatacagaatagttcgtgttgtagttaagagaatgaaattgtacatgtcacgtctctggttggttctttggacctacgttttggtggaaggtacttttctcactctcataggtctaacttgaccagctgaaccttttagtttagtgttttgacgttgacccacgaaaatgtggttttgacttttcttgaactttttttttacagcttcttctaaaattaccgacttaattaactttactttactttactttgctcctagccagaattttatataaatgtctcttttagattcttgcaattgtaacttatatttaaagaatattggttttttagaaaatcatcgccactcgagaatcaaccgaaatcaagtgaaagggtggacatatatatatatatatatatttcctataattcatgctttatgcaaacactaaatatcatttaaattatccatagtatttaatcaaataaattttggtacatcgaaatatgatgaaacgtaaattgatcctaacctaagagaaaatgcacaatcgttaatttatgagataataagtaattcagagttatctgaacaacatatacccatccgttaaaagtaaacgaatctatgaaacgataaaaagggggtcaacgaaacatcatcaattcatgatcatcaagaaactcataaccccaaacgcgatcaggcctgagatcttcaccacggtgaagctttttgtaacagccgctccaaactgctggtcaatgggatacaactctcctggtggacccgtcatgtatatgtaagtggacggaggcggtggacaataagacttcttcggcggtgaaggaggtagtggtggtggaggacaagcttgagacggcggtggaggtgatggcggtggaggtgacggaggaggaatgttttgaagacatggtgtacattttataggatcctcttcgagttttctattggttgatgaatctgaagcgttgatgatcattggaaacgtgagaaacaccactgtcgtcaagagcgtggcggcgagagcctttgtacggcgagttttctccggcatggtgagagttgttatatgcctggagaatcgaataaagagaggtttgggaagattctttggttggacgtaaaaagagttgaaaatttggtgaggtggtttggtaagagggtgcatgggactgatatactagctagtacttcttcaagactataaatttctgtctaaattttgttttttattttatttctattgataagatacaaaaatactttacaacatgcaagaatcaaaagaagaagaagaatatattctatagggaaaattgaaatcggctcttagttacatgtgagttggagcttcaaataaggggtcccatatggaccatctaacataaaatcgtgttacttgaaatataattaaatacaactatagtggaattattagcctttaatccaccgtcgtccacccaaaaataaaatattcacgaatttatacgcttaaaagcttccaaataattgttaccaataataagaacgtttgatgacacaatgattgatcgtaatctgaattaaaaagctaaaagcataaatgtatatgactctgtagcctgtaaaatcgttgctaaagcgtgaattggtcgctttttctatcatatgataatccttaattgtattgtattagatgagaaaaaaaaaacgttacgatttggtaatagtagagaaataataattaggaaaaagactatactacagcgtctctatactgtattccatgacggttcttttggtagcaattgcacatgcagtgagaataaatgaatgagttgacttacggccacatactacgcaacgcaaattgctccaaagatttattataacagatatatgttctaacaattacacaaactttaatgctcttatttctgttaagaaaatgacaaagtagttggaaatctattccaaagctggaaaaggggatatacatcgaccgactcaatgggctgaaataaggactttagcccaaatcaaaaattaattcggaacaaagattagcccatatccaaatttgttactcatatcctcctttttttcctttttgataaaacgtaaaaagatattccaaatgccattgttttgatattattaaaaaaggtcgttacaagcatcagaaaaaacgaaaacgcaattacaaatcgatgcttcttaacgaacattgttcccctacaaaaattatccaatgctactttatccaaaacgtgaaaaccatagctagagcagaatctatttcttggaccagaagtcacagaagtgttgagacttggaagccagagttttctatctgcttaacaaaaacagggtcagtgattcctcattagtcacagtccgagtctcctagagatgcaaatccaaatatgcgagattcagattcttcgattctttcccacgaaaatcgatatagttcagtagctgctttgagaatagaactcaaagcttgaaagcggtagagacatctgtgaatgccaatcaggcgtttggttcaagtcgaaattcatttgcattgattggttctggaacaatggttctgattggaactcatagaccatgtcatcgaccattgtctgtagctcttccaagctgtattgcttttcctgcacgtcaatattatcaaaccgtttacttgtgtgagaagaaacaaaacaagatcagtgaatttatgtacaaaaatgagatttacctctcttttagtctgagacataagtgaaaccatctcttgaacaaaatcgaagtacccctattgtagtgaacaaaacacaaacatatcagctttttgtaataaacaaaaacaaattataaatatttgaaaacaatcacaatttgaagtaaccatgcatacctcatcttctccagaatcatagagtccaacgtcgtacgagcttcgtttcctctcatccgacaaaactaaacacaagaaaattgtttccagacaacaatgtcagtcatcggacaagaaccaaaaaacctcaaaacaaagtctgaacagatctttacctgaataagcttcttgaatctgctggaatcttcgtttagcttctccagatctaaaaggatctttcgtccaccggtcaggatgccatatcttagcaagcttgtgatatgctcgtcgtatctgctccgccgaagaatcaacggcaacaccgagaatctcgtaatacgtttgcctaatgccaccttccattggttattacgtaaataagcttaaagcattacactttacgaagagataattacttgtaagtgtggtttggggtttatataaaacaggagttgtgttccaatggcggttatatggaagaaagatttttacaaaagaagttctagaagatttcggcttaccaaaaatatcttgtctcaagattcaagaacgttcgggaacatagtaagaaggcagatattatccacacaatctttagatattttttcattggacggccgcgattgaatggacggtcgcgtcatgatcttaacatgacacgtggttttaaataactttatttggaaattgtgagatttgttatgttttttgtagtttaatactttacttgtggaagcagacaagtaatgcttattcacattcagactcggtgaacaagacatggatttttcttatgcacattcaaatctatcttttggctaattatctaaaaagttacgtaaacaaaaaatgttgggtttagaccatgaactattgtttttgtttatagggttggttacgaaaatagttactcaaactgtcaaacatagcagtctagtagtttgatgaaaaattggcatctacaccaaatatttgcgatgtagttataaaattcagacatttagttatttacgatgactaaataaatacatgatagactgatagtatacatgttagattggacattaaacaaaaaaccagcagaaattaactgaactctctttgtccctaaattttaatctaatttagtctctttgcattgtaccaaaagtaaaataaaatgaaacgaaaaagattagaataatattaaagtcaaataatcaagattactgtgatacttccccattcactcgcacctaaaaatttggctttttcttcaatcttttttttttggttgtgtataacaactatttcgtcaatcaaattttgtttttttaggtcagatcaaagaactgttaatatgtacctattatttattatagttgggctaatgagcctttacagacgcagtctacctaacttcaacaaagaagaccacttgaaaagtggtattgttagttgaaactgacgacaaaacacattggtgttggtttgaacataaaaactggaatgagtatcctaaccggaagcggaaatggtcccaaaaatttaaccccctttcgaactcaaaaattagatttatcttattggatctcaaaaccctttatctaaaagttctaactagatcctgaatcaaaaaatactcgaatatccaaaattttatcttaaatcctaatttatacctgtaagttcttttaacaggtatttagtgcttctgaaaatttatatccgatccaacccaaatttaatagaatctaaaccgaaaccaagccaattttttaatttacttggataatggactcttttaccggagagacccggacccaactcaagtacttgaatgtcaaggcctaggtcgatatatacaatcatttgtaaaccagtacttcgtttttgctctaatacttctcttcctttttcactagcatatgtcttcatttcatttttttatattaaatgtaattgagaccatggtagatatcttcactacatatattgttcaagtatttactatatttaatacttgaaaaagatgcttcagtatatttattacttgaataagatagttcactctcttatacaagtcataaaccagttaaaaaatgctttcattttcatacagtgcaatagtattcacttttattgtttatgttaaattgaaaccttttctttttgtctagcaattttgaattatcacttcgtgtttcatgtttaccctacgaaacctcttcggtattattattatttttttttttactgtcgaagactaaaatgtttgtcatatggatgagacgcatgtgaaataggaaaacatgggaaactttgtttcagcttacttggcataggcacgtatttggagatacctcaagatgttgttccatctcgatcggtaatgtttatttgctttgctgttcaacgataattttctattttactaaagtcactattaactacttctgcatcgattcatgaaaagggagaaagatgtagtcgttataattgataaaagaaaaggtctaaaatatcggaaacattaataaaaatgtattggaaaaattcaaaactaagtttataattagataacgcaactataatcttttcgccacgttttttcttgtcggttcggcattgttttatttaatctatgcaagaattcaagatatctgtactgattcaatattgtataatttcacgtatattgccgtttagtttaaatgcatgcatacaagctttcgatgtggtagttattaaacttacatcaaaattcactaaaaattaaagaacaaaatcaaatcgatgtaatcaaatttatttataaaaacaaattaataaattgaattagatattaaaatcaacgtaaattaaaggaatggtgggaagacatgaatcacacgtcgaaaacacacctacccgaagggttttggagagtagacaaagagacaaacatagaggtgtgagtttggtttggttttgggttttggggggttggtagtgtttgaggtccatatgcctcgatcttccgcttctattaattaattttctctattagaaatattatctaattattccactccatcgaaccatgcacatatataatgatatgtataagcccatcaaagtttttgaattcagtgcaaacacttgtcaaaggagcagtcccgatctggttccatcttatcttcgttgtctgttcgaccttggctttggctttaacatcacatttaacttcttcttttttgttaatatatcacatattgcttagctccacagaattatcaaaaaaaaaaagggaaaaagcaaaaaaaaatgcaaacttttgactccttaattagggattaacgactcttaatatgctcatgtgtatattcaacaagcatgcttagctacatggaaccctctcacgtcaatatgtatattaactgttcgatatacgtatatacgcataagcatatgtatatcacatattcaataggtaaactatactgtatttgatttgctcgaacatgaagactaaacatttttacaggtgagtaataatttagtctctacatgtaactatcctatcagctagatgaaatagttcctccaaccgaatcattcaaattatttatacaggaaggtttctataaattttaggtccttttatgtcatcaatttcccatatagacaatcatttgttaatattggaaattcgcatgcctataaataatctaggatttatgcaaaagaaaagaaaaccgtatgtatatacgaacgtaaagacttaagcatatatatacctacaatcaaatagacaaggaaaaaaaaaaacctcagaaatcaaaagtttcgatcgtctatctaccccaatccccatcaataacaaaccgataaaccatgtacgttagtttatgatgatcataagaaggatggatgaatgaaataaacgataaagcgcgtattagggttttgaggagagatcgagaccaaggtcgaacagacaacgaaacaaagatgagaacacataagattgctcactttgtcaagcctagcatcgaattcaatcactcttcatctccatcttctgatgtccaccgtatataacccatcccaatattattattctattggttaccaaagaaaaaaagatatttttgtgaaggaggaaccctagctacttatagaagaagatgtaagataatagaggaggagaatccacacaactaactctatgagttaatagaaggcttacgacaaaacttgatgaaacatctggagtagagaacgttgcacgtgtcacccaatcactcgaattactctttggtttattgactcacgggtgactcgtacgtgtgcttgccttcgtgcgtgtggtatatacacactttatattatacacaacacacactgtaccgtacctaccaatgtctctcactattgtaaaaagtaaagattcgatacctcccatgtgcgtagttataactagatttcttatgttgacaattcatattatactcttaaattcgaagtccactatacgaatttccgaaataaccaaatatgttccaccagagaatatggatatctagctttttactgatgtcacaaaactactgatgaacattgtcattgtttcgtgaaagtaatacatttcgtgtgtgtgttttgaaaaatcatattgttttattttattttgtgtgtgtggtcgattattatttccttttgagaagcagtgtaccatattttacctttatttggaatgttactgttgtgccgttactgatagtacaatgatgaacttcaataattctgagatgagttaattcatgtgcttccgtaatcctttttcttcggtatgttgtctgtgcttttgttttatttacgtatgtgtgtgtttgttttattaatttattcgatagaatgcgttagtataacgaacataaatcaggtttagttaacaaaaaacacaatttcctatacaaaaaagggatgaaactgtgcactgactaatttgaaccaagtaattatgtaattcatagaaatgttctaattaatcagtgtaaaaacattactactaattaatcccatccgcaaattcccaccaaaccttgttgttgaagactccaagttttccccacctaccaattgcgcaaacttccataacttttccacgtcatcttgaaacccaacctatatttttggttttcttttttgttctctttctcattgtactttattgtattaaatctaactagttcttatttaaattttgttgtactcaatgagttttaatcttttcaacatatgctatctatcacatttattacaatggactgtaaattttgattcaaattcatgttaatggtgtacatctcctattctcctggtaagtataaccattgacaggtttaattatcatcaaagttcaatatacaatattattgacaatgcgatgtgtatcttttcagtataaaagaaaaaagtgaaaaggccataatctaaagcatattgaaaagatgattcaatacatattatacattatcctctatgttgaattcttgacaaaattttattagttttttggggttttttttgttgttgtcaaaattagtttttattttattttctttgactacaatttataatttggttctactaaaacaagctgacttggacctacaagaataatgataataactattgggccttatagctaatgggtcaaaaccaacccaatagcaatgtgtattatacattcatttttatgcttgggccttaaaattcctaatctcttactttcattttgtatgattcgaacaagagagtaggtagaaaacttagtaagaccactgaatttgaaaagcttttaggtcattcgatagagcaaagaattaatgtgttacttgatctgacttcagagttagattgaaaatgaagttttgggtcaaaatatcgactcttcgcgttggaccgtatggatttttgcatacgatacgaacataacaacagctttaattgacttgagaataaatattgagtgccatagaagaaaactatatcacttgcttagaaatttgtcccatttacattatcattttccatttataataaatgatactatgtgtgtgcaacacgcattttatttatttcgtaactagatagtcttttctaatcaataaatttaataaaatgtcaacatttgggattatatggattatacaggattaggcgttgggcctatagctacgtactgttttgtcaatcgatgtatttcccaaaaaatgacttttttccctccatcctcgtttggtcaattccaatttcaattctgtttgttctatttttcttgccgtttctattccatacaaataaaagctttaagcccaatattcaatttcacaagtcattatgctggttacaatttttgtatttttccttttcttaaagatccttaaataaagtttaaattttatgataactttatgagaaatttatgtaatgtataaacgtacgcattcatacaataaaagcatgcaccgggtgaaatttggtgtgaatttataattatcccattctttacattcacgtctgttaaaatgcgtgacacgatccaatcccccataccattttgttcccatccttatttttattatatacttttttttgtattgagattttttttttttttaaaagtgtcaacattgattttgcatttatcggaatggacgaagatggaattaaatcagaacaatttggaatattttatgtttagagttgctatatattaaaatgataccatgtatgatgtaacatatctatccatattaactagaataaattagaatggatgtcaattgtcaacaaagtgacgagattccacgtagagcttgtcgatttgtcaaatcttattattttagaaaggttaacagtatttatataaataagaagcttgtagttttatgaccgttcgaatttatatttattttcgttctaaagttctttcactagtatcttttttgttcttatgtatttgatgtatactatatatagatttcataattagcgcacatgaaaaagagaagaatctcccatttaaagaaaataaaggaaaaagagaaatgcacggtgagatacatgaatcattgttgaatggactaaaacaagcacataaaatgtgggtaatgacataaaattataaatattcaaaatttgcaagttcatgattaatagaaaggaaataaggtataaatgactagaaaattttctcgtccaaactgaacacaaatagagtatttaatgtttttctcaattatctatgtggagatgattttgagactataaacaacaattgtgtaacggtcatggtttatatactcaaagataattaactttggatgtacattgtatttggggtaagagaataaagtaatagattttgtccgaccggttctctctcgtgcacaatgcactagtggaatgtaacatcacatgagatcacgcctcattttttttttcttctatgaccatgttggtaataaataagattagtgctatgaaagtagaaatggttccattaggaaaatatcacaatggcagcccattaaaactggcaatttttccccctcctctctttttttttctaaagaaaataaatgtgtttgaaatttcgtggatttcacaattaggtttgcattttaaataaaaatatgtacactccattaaagatttcgatttcattttcagtttctaaattagctaattaggctttcgatagaatgtaaacagaattttgccctttcagaatgcagtaagagtaaccaccttccacagataaaatgaaataaatcatattattgttaacacatgcatcaccttattatgcaggtaagcaatttggtttgtacatgatgatgcacggtttataaataaatactacatagtacaaaattaaaatcaataatcaaatacttaattagtgactccttagagataattggatgaagggagagttggagaggtaaccgcaaggtgggtccatttgcaccctgaatttgacgcagacttttatcaaataccacgaattagccatcaattttagaggtccatttccgacattaacttctaaactacggtcaaaccgaaagtgtaaaacaataataattaatacttttgttgtgcaaacaattacatagatattttgaactaagtaaataccagaattagctctctttttagcggtttatctacaataataattacaaaatatattttttccatcattttataagtttataatccaccatgaataagtccatgtaatattttgaacagaataaacagtttttgtaaacaagtttataattttatatccgtaccacaaaaagctatgatacataaatgtattgattggagaataattttataaagggtttacaaaaatcatgattagagattgataattgattgaagaataatgaattcttaggttttgtaaccactgatcacctgcaaatgtctttcgtaatcagatacataaccacataatctagtgttaacacttgagtatagaatcagtccaaatgactaagatttaaactaaaaaatagtgctaagtaatttatctatatcaaaacatcgctacaacatttgtctaaactaaactatactctctgatatattcactaatccctaaaaatgaaatttaaccgaaccaatatcatatccaacgatccaatttcatctataaaaaactgtcctaagactatgtgaactccgagcatacatcacacatgggaaaaagcacaagcacaagaccattgcaaaactcacaaccgtctcagttattattaagtttaatgaccttatctcgtcgaccatataaagttcaagccagtaatcattcttatataaaggtacagaaaagttttaagaagagaaataaaacaaagatccgaaaactaaaaacgtgatggtgtcttctcacccacctaataaaatatgttttaataaacaacttattcaaaacagtattgctctagtgtttcagaaactataaagtaatttacatcaagtttttatattttaattttgatgaataggaaaaaaaggggttgaaattttaaattaggtttacttaagacttcaaaggaggcctaataaagtgataaacggatatgttagagagattaatgagcttgacccacctaaaagcctaatactacacaaacggatggttctactttactcgtattgccctttttgtcaacggggcatgttttacacgtcacgacacaagcgcgtgacaaaaattaaaaacttcttttcttttcctgtttcttttttttttttggtttttttttggacgttagttttcttatattaaaaattgaaataatttaattgataatttaatttatttattatacttttctaagccttaaaagaagagaattaatcaatacctaaatagtaaatacgcattccatttttagaaaaataaatacaccttcccatataaactgttttaaattattaactacggatatgtacggtattagattttaatccacggtatattgcgggtctatattttcattaattaaaaaataattgaatattttgtagaatgatttaataaatttatgctattgtttgatttaaatgtataattcaccgcgagacgaaattttataactcaaattttaaagttttaagttgtatttatttattttgttaaatgtttaatattatataattgtattttgattgttgtttctcggatttcacccgtagtacaccatcccatattaatatcgaatcaaacccatcaattctacgatttcacccgtgctagtatttaattatataataataacttgattgtcattgtaggatttcactcctagttctatcgcaaattattatcaacccaaaccaatcaattctaaaatttcacccgtagtacaccatcccatattaatatcgaatcaagctcgtcaattctaggatttcactcctaattctatcgcaaattattatcaacccaaaccagtcaattctaaattatcacccgtagtacaccatcccatattaatatcgattcaaacccgtcaattataagatttcacccatggtaatactgcgagagaaatcttatgaaagaatcgaaatgtgttttaaaaaaattaaagttttaagttttttttttttaatattgttaattttgtttagtgtttaagattatataattatattataattgttaattataggttttttttccgtagcatatcatcctatgttataatccactcaaacccgtcacaccatataaccccgtcccatgaaactaaacacaaatttgtcattttattataaatttcaaatatgtataaaattataaacttcaaaaaagattaatattgacccaaacttcatcattgaattttgagtgttatatctaagatttctctcgcagtatatcgtctcatattaatatcttttatattttgagtgttatatataaaatttgaaacttaaaaaaatacaatatcgaccttgattatatttaagacttttcctgtaatatatatcgtctcatattaatatattttatatatatttataatgtttaaatttctttaaaattcaatttataatttttaaaactttataagttttaaaattataaatattcaaagaattttttaaagataaactttataaaaagtttttaaaattataatatttaacttttgataaagttataatatttataatttcttgaaacattttaaagtttcaattctttaaaataaaaaaacccgagtaaatcggataactattttaattttggacgcctgataaatcaagcttcctgctcattcgtaatcagaatcattttggtccttttataatatgggtctgaaccattgtccaatttttctaagcgatgtgggacattgtacacatattatttcttcataggttgaataatatatgtctgttttaaaaaatttaaattacatcatatgcagaaaaaaatataatattttattaactatatatattttatataaattcaaaataaataaagtataagatcaagtaaaagtgaaagaagaattatatatttatgtttaaattaggtagaaatattttaggaaattagttaaggtaaataacaaatatggttagtttagagatattgtttatattaaatttggtaattaaatcattaattttcgtttttaattattagtttttaggtaacttttccaaaaattaatgttatccaagatcagaacagaattaaacatgttatccaagatccgaacagagttaaaccgggtaaaacccacccatttgaattaattgttgaattatggctcaaatcttcaacattatcttcaaaaaacgtttacaaaaatgtatatatagataactacaatataatacggttttcatagtaacaaaaatatatatctatttatatatagatattttcgttacttttaaaaatatatcgtacaatgcagtttaatcttaattcaaaatactgcaaattaattaatgatacacaaataatcaaatgcttttaattagcctatcaatagagtattaacacattttttttccttttttttttgtgtgcaagctattatacatcttgatatgcaagctattataattaaaacaatcataaagttagatcatttctcacttctccaattatatatgtatatttcaaaagcgtaacttaatcataatttcgatattatttcatttacaattcataaatttggttatcttttcgttttaatattttctatagtaaaagaattatgaagaaatttgattagttaatgcttataattttgattttttcatttacatgtcataaatttggttatcttttcattttaagttttcctatttataaatattaaacagtaaaaggattatgtaatattttgaataattaatgctttcattcaatatcagattcacatgtttgttgtggaaattaaagttttaggaatattatgagatcttctataattaataatatactcattaaataggtttatatctgctgttggaaaaaatgtgaatcaaaaagaaaaagagaaagaattttggatataaatttaaatttatcaaaatagttacacaaaaaaagaataacgccgttgatgaatggtgaccaattgaaaacggaagcttgaagatggagtcactgtcctgtcaaataaaaagactttgaaggtctttgtcatgttttttcttcaaacaaataaatacttaaggaaaacaaaagttatctatcaaaccatatatattaaaaaaaactaagaaccctagttgaattaaaaaataaagaaaaaaaaggcaaggtaaaggggaacagaggagagagaaaaaggtgtgaacagttaatggcggagcagtataaggaatcgcttctctctagaaatcttttgccatagctggatttcatttttttgatctctctctctctcttctcttgtaataacaaagctcacaacataaagaaattattacagaacaagcaagcaagaagaagaagaagaagcaataaaaattagtgcttttttatttagtgagagagaaaagctctgaagaagaaggaagttgttttcgagatgcgagctagtaaaggaaccttctctgtacttcttctctttctccttttgattctcattctgcccagtctttaattttttttcctttttcttcttcttctttcttcttcttcaatttcactcttgttgggtaagtcaagaatcgtccaaagtctttttttttttcttgggttgtttggtattggatctgtttcttggttcttttaaagattggctaatactttgattttggggggttttgatttgatctagggtttctagttagagtctgaagacctttggatttgatgtaggactttgttttttgttctaaagttaaaaaaagaagaaaaaaagaaaaagaatctgttttctcatccaaatctacccaccatttttgttgtgggaggtttttttttttattattacaaaaagaaaaatatagagagaaggagagatttgttttaaagtaaatattttgattgtttatgggaatacctgatggttcactgctagatctaattgataaggttaggtcttggataacttcggattcaagtgattctttgttcttgttgtcttcatctaaacaagactttggaattatgcctatcgtttccaaaatgtgtcatgactgtggaacaaaggtggaacaaggatattgttgtcttagttgtggttcttgttggtgcaagagttgttctgatacagaagagagcaagatgaagttgtgtagagaatgtgatgctgaggttcgtgagttaagggttaagagctatgataaggttcatcctcgggatagccctgatccgccttcttctcttgctaccgaaagcgagagtcttgcctcgagtcttgaaatccgtgattgtaggaacatggcttctattcgttgctatcctagcaggtaaagtttcgatttttacattcaattatgtgtgaaaaagattcaatttttatgttcaattatgagtctttaaacatgttggagtaagtgaatgatttgtgtttgcaggggagaggaagaagaggctagatattgtggtaaacagttgttaagcccttcgagtgataactatcaggacagttcagatatagagtcgggtagtgttagtgctagacatgagctttttagttgtaaatcttctgctgggtccagtcctcacgacagtccattaaggaacaattttagtcctcttgggcgctttgtacagcacgcgaaagacctaagaagccctactgtttgttcttttgataatcatcaagaacaactcttggctgataatttagttaagccaggtcagggggtattggaacaggaagatcacgaggaggaagaggataagttgcaacagccgttggattttgagaacaacggccgcatctggtatcctccaccaccggaagatgagaatgatgatgctgagagtaattactttcattatgatgacgaagatgacgatattggggactctgctaccgagttttcattgagtagtagcttttctagccacattcctaccaaagagaaattgggagaaaacagcaatgaacctcttcgaaccgtggtgcatgaccacttccgagctcttgttgcagagctattacgtggggaggagcttagtccatctgatgatggcagtgccggggagtggctggatattgtcactgctttagcgtggcaagctgcaaattttgtaaagccggatactcgtgcaggcggcagtatggatcccgggaattatgtaaaaataaaatgtgtagcatctggaaatcaaaatgagaggtataactagttgttgaaaccttgtttaaatcgtcctctgactgatgattactaatttgggtgatagttactaaatgaataccttgtttctgcagcattctcatcaggggaatagtgtgtagcaagaacattacgcacaagcgaatgatatcgcagtacaaaaatccaagggtgatgcttttagctggttctcttgagtatcagagagttgcaggccaattagcatcctttaacacgttgcttcaacaggttggtgtgttactgtttctttatgatggctgcataaaatctctgattaacaaactgaacaactgaattatgtgtgttggacaggaaaatgaacatatgaaggcgataatagcaaaaatagagtcccttcgtcctaatgttctgctggtagagaaaagtgcatcttcatatgcccagcaataccttctagagaaggaaatttcattggtgctcaatgtgaaaaggtcattgctggaccgtatagcccgttgcactggtgctgttctttgcccctcactagatagtattagtactgctcgattgggtcactgtgagctgttccggactgagagagtgttggagcaacatgaagctggcaatcagtcaaacagaaaaccatcaaggacattgatgtactttgaagggtgtcctaggcgcctaggttgcacggtatgctcctttattggtttcacagttcttgttttgcatagcttgaacctttgtagctaagaagtctgctatcttaaatttattaacttccttactgacttttctgaaacttgtgcaggttgtgcttcggggaagttgtcgtgaggagctaaagaaggttaaacatgttattcagtacgctgtatttgcagcttatcacttatcgttggagacttcattccttgcggatgaaggtgcttctctgcctaaaattagactgaagcaaccagggatggtgcggactgcatcacaaaggaggataattgatgaaggcatttccttaataactcaatctcctacagaaacagatagtcaagctttgcttgaaacagctgcacatgaagatgaacatacggctcctatgcctgagcatgaagtttgtgaatcattgtgtgaggattttgatcctactcagatattcccaccgtcttctgaagttgagactgaacaatctgataccctgaatggagattttgccaataatttggtaacaagatcatattcttcgaatcagttaaatgatttgcatgaacccactttgtgcttaagtagtgaaattcctgaaacgccgactcaacagccgagtggtgaagaagataacggcagaggtgaagaagagaaccaattagtgaacccccaagatttgccacaacatgagagcttctatgaagatgatgtctctagtgagtatttctctgctgcggactctcatcagagcatattggtctcattttcaagccgttgtgttttgaaagaatcagtatgtgaacgttcacgactcttgcggattaagttctatggatcctttgataaacctctcggaagatatttgaaagatgatcttttcgataaggtagctctttcatctataaagttagttaatccactttttcatctttcttaaattttgaagtctaatgcctttctgttccatttctggacagacttctagttgtagatcctgtaaggagctggttgatgcgcatgtactctgctattctcatcagaatggaaaccttactatcaatgttagacgtctcccttccatgaagcttcctggtgaacaagatgggaagatatggatgtggcatcgttgcttaagatgtgcacatgtagatggagtcccacctgctactcgtagagtagttatgtctgatgcagcatggggattgtcttttggaaagtttctggaacttagcttttcgaatcatgcaactgcgaatcgtgttgcatcttgcggtcattcgcttcaaagagactgccttcgattctatgggtaaacgcaggctgtataatatcattctcttacagttatctcaatgctgttacactaataatattatgatttgttttgtagatttggtaacatggtggcattctttagatattctcccatcaatatacttactgtactcctcccaccgtcgatgcttgagttcaatagccatcctcaacaggagtggatacgaacagaggcagctgaggtagattttaagaaaaacttaaggctcttttgcttcaggttttggatatgtaaatgctaaaactcaaatacttctctgtttgcattttacagcttgttggtaaaatgaggactatgtatacggagatatctgatatgctcaaccgcatggaagaaaaaagcagtttgcttgaacctgaacaatctgaagcatgtgatctacatagtcgcatcatcggattaatagatcaacttgtgaaagaaaaagatgaatacgatgtaagcttcttctgtttctgaaatcttgatgatgcttgttgaatatgtatttgatggaatattcctcatcgtgaacaggatgcactgcaacctatttttgaggagaatctgcaaattcagggaagtttggatatcctagagctgaatcgattgagacgagcactcatgattggtgctcatgcttgggatcatcagctttacttgttaaactctcaactcaagaaagcatcagtctttaaaactggtgatgacaatgctcctcggaatccagagatgcatgatcctccaaagattgaccgtagaatgcaggaaggttcagatgagagggatgaacaatcccatactgattcagaagctaatggtgataacaaagatccggaaaacattccctcccctggcacttctctatctgagaggatagattcggcgtggttgggctcgtttcaaaatctagagaaagccgagactattgctgagacggaaggcttttcagctgttaattcttctctccggaggcttgccaggccaattcgagtccagtcttttgattcagcgatacggtttcaagaacgtatccaaaaaggtttgccaccatcttctttgtatctctcgaccctcagatctttccacgcttctggcgagtataggaatatggtgagggaccctgtttcaaatgtgatgaggacttactcacagatgttgccactggaagtacagaaattggatctgattgttggttcagcgccaacatacatctcttctgcatctcaaatggctgatggggcacggatgttgattcctcaacggggccttaacgatatcgtggttcctgtatacgatgatgatccagctagtgttgtatcatatgctatcaattcaaaggaatataaggagtggatcgttaacaaaggtcttgcttctagtagtagtagcagcaatttgaataacagagagtctgaaccttccgccttctcgacttggcgttctctgtcgatggatgttgattacattcaacacgcggtgtatggatcttctcaagacgatagaaagtctccgcatttgaccatttctttcagcgaccgcgcttcttcttcctctactgccactgaaggtaaagtgaagttctctgtgacgtgttattttgcaacgcagtttgacactctgagaaagacttgctgtccgagtgaagtggactttgtgagatccttgagccgttgtcagagatggtctgcacagggagggaaaagcaatgtttactttgccaagtcattggacgagaggttcatcataaaacaagtcgtcaaaaccgagctggattctttcgaggattttgcacctgagtacttcaaatatttgaaggaatcactcagttccgggagccctacttgtcttgctaagattctcggtatctaccaggttagtgacaatataggagggaatgtgaacttgtaggactctgaaatgaaataagtgagcatgtgaatgattgatttggaatgatatttgttgtaggtctcaattaaacatccgaaaggtggaaaagagacaaagatggatttgatggtgatggagaatctcttctacaacagaagaatatctaggatctatgatctcaagggatctgcacggtcaaggtacaatccaaacacatccggagcagacaaagttttgttagacatgaatctgctagagacactgcgcacagaaccgatattcctaggaagcaaggccaagagaagcttggaaagagcgatatggaacgacaccaatttcttggctgtaagtgttttcattacccccaattcatattttgttcttaagtgttttgattaatctgtttccccattatcctcttgtggttagtctgtggatgtaatggactactcattgctggttggattcgacgaagagcggaaagaactagttctcgggatcatcgacttcatgagacagtacacatgggacaagcacctagagacttgggttaaagcttcaggcattttgggtggacccaagaatgcttctccaactatagtctcaccaaaacagtacaagaggaggtttagaaaggccatgaccacttattttctcactgttcctgagccatggacctcttgagtgaaagaaaagaaaccatttttcatcattcttttgttcactgattccaatttgttcttctcaaataaaaagggaaattggttaacagacacatataatataatacaggttcgaacctgactgattgatttatcttttttttttttttggtgtgttggtttctctgagttctggagaattgtatattgtaattatcggccaaactaaagccccccaaatttaaagaaaaagaatactaatgatttgcctttttctcatatctctttctgtttctctttcgtcttagtattcctcttaagaattgtgttaaactaaactaacaataagaataagatggaggaaaacactgaaaatcacaggtcttctgctttgctcttttcaagaaatctaacccttttctgcaaccaaaatgatcaaagaagactttaaaaaataaaatattcaaagattatctgaatgacacaagttattcttccacttgttgttagtttgtatatttttttttcttgatttagaatagactagaagaagatgtaagttgtgacattagtaacacaagttggagtacatttgtttcctagtgtaattaaagaagcgagaaacgtggcttgagaaacggatcgatgtttcaacaaaaataaaataggatcaaagcccttcaaaagtattgatcacctcatgtgattttggcaccttcttctttttcttcaatcccaaagtttcttcctccattacgaagcaaatgttgtctttgatgaatcaaaccacttggtatgtgaaggagacaaagttgtgtgatcttgttggagaaatcagagccactctcactctctttcctcagtttctcaattttccactttggtaacttcaacttcacgctactcacttctctctcttcatcattaacctctgtcttcttcttcattaccgagagatcagatgatgatctacgagacagcttcagattctctaatctctccttcgcactcatctggattcccgaccgaacccttcttggagttctctctttccatgttctgtcacatgggttttaaatgatttactcaaaaagattctaactttgatacctaaaactaagtagaaaattgaggaatataataccttggaagttcaaccatgaagtaaatccttttggattccaagttttggtgaggctccaagggctttgctctgattcctaaacgcttcactgcttcggattccaagagaacgtggcctggaaaatctttaaccactgtaccagcttccacaggcgttttcagtttgaaactctcgccattgatgttcatgattgtcgctgttttcttggttcccaagctatttcccattttggtgaatgatgttgtgtaaaatgttagtatcttttaggttcacaaatgagatgaaaaaactttgtaggttggtgtctattaagagctcagtagttcaaggtgggtgttgtgttagatcagatcattatagattttggatttgatttatggttggttgctgatgatagtgaaccatttcttggtcaacaaaatgccaaaatcttgaaaattattaaaacaatgagaagacaaaagttacgtcgcatttcactatcaatcttgaaaagaccaataacaacccaaaatttatgcttaattttataaatagaaatggaaaatgtgtactgttcttcacttcgaccatagtatattttgtactatgtgattttggaagttttgagaccaatgttttctgagaaaatgacacttgcgttaatcgctccgattaatctggaaaactacgttgtcgaaacattttttctcaaagacacgtgaagagattgacttttaacgaatttgaaaacaaaaagctgatttgatttctctttctaggaacagtaacaacacacgacctttatcaaatcatatgaaacattttttttaacaaaattaacaaatcaatacaaagatgagtcaaagagttcgattctcgttaactcttttgactccaccttctcctcaaatggaaattaaattagtcttccaaaaactcaataagatacaggacataataaacagatcaatagccagcaaaactaaattaattcatgttaagggctatttagagtgaacctaattttcgggatgatttacggagaagctctagtaaagaattagcttttcgtttagctctctctgtaccgtctcttgatagttccatcaatggaacaacagctccaagtctaccaatggagatcagtttttcagtatctctcttgcaaagacacagtagtatcgcagctgcgttctctcggtttcgcggttgatccttctggagacaatctatcaaaggtggtattgcgttggctctcaaaatcgcagttttcgcgacttggttactagctagaaccgagagtatggtcaaggcttcatcagccatcctctcgctcgaggagtctgtcagcattttcaccaatggctttactataccggctctaactgctctgcctttgtttccctggtaaatacacaagttgaacagagccgtagctgcgtctttcttccctctgacgcttccatattgaagcagatccactaaggccattatcgcacctgatgcgcctataatgatcttgttctcatcagctaacgaaagactaaagagagtagctgcagcgttttctctagcttccatgcttccagctcggaggactagcactatagatgtgactgctcctgcaagcatgatcagttctttgttgtgttcgtatatggagaggttaagaatgcaagtgacagcattttcctgcgtttcagtgtcaccatctgaggtcaaaagcttgaccaaaacagggatggctcctgcctctgcaatcagaattcggttgtctgtgcttctttttgacagagagcggatttcagaaaccgcagtcctgcggtcttcgattgattggctagagagtttacaaaccaatgctcggatcgctgacatatctccacttagatcacggaaagacccatcactgtttttggtcctaccgttcatgtaaccacctggttgctcaatgttgtgcttagtgcaccactgagatatcaggcttctgaggacatagtttggagtaagagtaaagttttcaagtttctgctgtgtctttgggcagctcagatttccacagtctatccatctctgaatgaacgacctctcgtatgtctgccaacgaagagagaagatcattgttaaggtttcaaatcaacaaccatacgttagcactatataaagatttgattttttaaaccagacctgtcctgtggaaacaatagcaggatccttcatcagttccagagagattggacaaagaaagtcctctggaatcgtgagattatccgatttctgtgagtcatcgctgttctcggtaactgctttctctaatctctcatcatcaccatcctttgataaaaagaaggccaatgatactgaagagctcttccaaggagggggtgattcaaatttcttctcatctgataaagaatgcactgtctctggaatactctccaacttttcaataacttttctattacttgaggcatctttctccattggctcagataaaccactcgagaacttcttcgaatttaacgatccatatctctgcattgctcttcttaactgtaatcttgctagttccacctaatcacaagcaaaaaaaaacccttagaaacacctccatggataggaaaaccaaatcttcatacattctacataatgaacaaacttttacctgttcacggacttcgtcagagatatcatatctatcatatgtcaaatcacctaatgctttctccagcttccatgtaacacattggaactggaatgagatcctcttggctgccccatccttcaatcaaaatcacacatcaaagtttagagagctcctcatgtatatattaataatgctcttcactacacaaatgtcaacaatagtatcttccaatctaaaaaaactaaaaacaaattcttcctataaattacgttcctgccatggcgagaccaaatcttcgtgaaatcacaaatccattttcaatcgttgagaatggtttagaatgcttacagaggactcgcgagcttggaaactagtagctgaagacaaaagacgcttcgcggcttgaagtcccaccacaagatcagaccaccaatcacattcatgagaattc

SEQ ID NO: 133 - DNA, 116944 bp, Arabidopsis thaliana
gaattcgctgatcgtcttcagcgtctcgaagcaaaggtggatttgttggtaacaaaggcggatttgttggcaataaaggcggatatacaggagcttctcatctcagccaagggtgagaaagttcctgccatgaagacttctgctaaggcttcttctgagagcgatgactcatacatggacacttcttcggaggatgaatcgtcttctgctgaggaacctgtaaacaaacctgctgcaagtgccgccaagccagctactaaagattctttattctctgctggtttcaagccagctgctaaagattctttattctctgctggtttcaagccagattctttattctctgctggtttcgagccagctgctaaagattctttattctctgctggtttcaagccaggttctttattctctgctggtttcgagccagctgctaaagattctttattctctgctggtttcaagccagattctttattctctgttggtgtcaagccagctgctaaagattctttattttctgttggtgtcaatggtcgatcgttctctgttacgggatttgacgcttcccttcctgtggatgatataaagagcgcattgagtaaatatttcagttcttttggggagatcacacgcgtatttgttcccccaagccacggaaccggtggttccttaggatatgcttacattgatctgaaagaaggagcagagaaggcgttggaacttggtagacatgacgtgggaggatgggatcttgtagttggtaaggctgaaccgattcgcagtggaagtacttggccttttcctggccgttgtggtaatcagggccgttgtaccttctgttgaaggcttgaacctttggtagtgcatgaaggaagagactgctcgtggaactagatcacctagttttactccctaaagtaagaagactacctagaagaagaggaacgttttaaatttgtattacttgggagttttttcttatgttctagttaagtttttgacccaatgttaatgttaactcaattttgagttcttttggttttaaataagatgaaaaaaattcttgaagttaattttctagataagtttattgtttcttaaaagatttaaaagaagaggttaaaagacaggtcgtgagtacttttgttaagagcatatgtaaaactcagtagtagtttgatatgaaacaactagcgagcatcacggaaccaaccagtcgttttattccacaagtccaaagaaacgaaatttcattacttcctctaataacaaagccaacaatatcatcataggacgtgaagagctttagaagaaacaaacacacaaagcttatttatcattgctcttcaaatactccttgagaacatccataactgaaccaaactttgccttaaccttcactggtggattcgccaatctacaagccatctcctttatgttcttagaatgataatcaatcttactttgtgtaaacttcaatccatgagctgtactcaccaccacagtccgatcattcgctccaataactcctgactttctcagcttcatcaacgccgtcaatgcaacaccagtatgtggacatataaacataccagtagaatcagcaagagctgttgcatccatcaactcttcctctgtagcttcctcaacaatcccattagatttcttcaacgcatacacagctctatcaatcgaaacagggtcaccaatctgaatagcagaagcaaatgtagtgtttgctttcaatggattgaaatcttctttaaacccagatttgtaatgcaagtaaagtggatttgcattagcagcttgagcacaaacaagcctagggatacgatcaacaagacctaactctttacacatatgaaaccctttgtaaaacgcatagatgttaccaagattgcctccaggaacaatgacccaatcaggaacttgccaattaaactgctgcagaatctcaatcgccgccgtcttttgaccttcgagacggaggctgttgagagagttcgccaagtaaataggaagctccgccgtaacttctctgatcaaatgcatacatccgtcaaaatcagtgtcaatactaagcacaaacgctccgtttgcaatcggctgcacaagctgagccatggagattttatccgcaggtaagaagacaatcgaggggattccagcggaagcacagtaagcagagagagcagcggaggtatctccagtagaagcgcaaccaactccgatgactggtttgttcattttccggagacgattcacctgagaaacaaaaaaataacataaagttgtaaactttattgaagatggttatacagttgtaaactttatgaaagatgattcacctgagaaacgagaacactcatgcccagatctttaaaggagccagtgtggctgattccacaatgtttcacccaaagatcgttcatttgcagatactgtttaccaaatctctcagcccagaagagatttgagtttccttcaaaagcagagacgatgtcgtcatcgtcgatctcggggagtacccactctttcttcgaccacacgcctgatccgtacggccaatttgttttaccgacgcgagaatcgaaaaggttacgccagaattctccgtcgtagcgtttcaaggcggcgaaatcatgctggacgtcgaggagagcaccggattgtgaacggtagacgatctcgtcgagggagtaggattctgttgaagaaggtggagcgttgaaagggacgtaacgtgcggagaggttttggagttgatgaggacggcgacgagcttcgtctcgaatgttctcatcgggtgaacgacggggtttctgtggagtctgtggaggaacggcgggagaggcggaggtgcaacggacggtgaaggaagcggcggagtgaggtttaagtgaggtttcagagtgggaaggaaagtaggtggcggagtggggaagagagaatgaggccattatgagtgagagagagagtaaagtgaagagtttgatgatattgattggatagaagaatgattgttgacacctttagtcacaagtcacaagtaatttatttataacctaataaatattgggacgaaagtattcatttattgtttgtttttcatttgtcattccaatttccaaattatgtatatatctctctagtcatgaattttcttttgatggtagagaaagcaccagggagaaatgaatctttgacgttcatgaatctagtgtgaatttagtgtttaagatatcaaatatgcaaaaaaaaaaaaaaaacacgtatgtatggagtacatgagacatgtgccacacatgaagtatattcttatgagtaaaatgttactattatttgtatggattattagtcatgaattttcttttgatggtagagaaagaagcactagggagaaatgaatctttgacattcatgaatcatgtgtaaattttagtgtttaagatatcaaatatgcaacaacaaaaaaaaacacgaatgtatggactacatgagacatgtgccacacatgaagtatattcttatgagtaaaatataatgttactattatttgtatctattgttctttgttcttctaatatatatttgtgatttcgtcccattttattaatcaaataaatatattacaagcgacggaaacaaaaaataaataataaatgtcactatctttttgtcattttaaaggacaaaaataaataatgagatgagactatgagagcaacattcatacaaagtagacgacacttcatagttcatattaatgtatataggtatggagtttatgatcttaacgtttttggaaaagaaaaagaaagtaaaggacaccactagttatgggtcctccttttcgtcacattgggcggattgggtcaaatatacagtcattgtgaaaaaccagcccaataagcttatacttcaaataaaagacttgaattagaattgattcaaactctgaatacctcaactaaccgttgtgtgttctctctaaatttgggtaatagtgttttggggtttgggagagaacgacacaataaatgagaagggatcccttttctgtattttaaagcgttttgatagggaacttgagaaatttgatttcatgattcgtgtacttttttgttatgtttgtgactcgtgatcttttgctcgataaaagctttccatagtttttgttggtgctttagtctgtggaaactgcttatgatttggttcttttatctccaagttgtgggctgaaataatggtcatcaccagttgatacagaaccaacagtgttgttcgtcactcaagcccatcacagctataatgttctttttggaatcaaatcacatggttggaatcagtctaagcttgtctactcactttaacatctaatctgttgaagataaggattaacgatgtaataagtaagcgtggaccgaaaaagaaatgtagtatatgtttaggtagtgggcatttccaaatactatagtattgatttctgttgtatatttgatttgatactaaaatatgtgaaactcccaaagctaattaatactatatttttgtaatcaagttatgtcagtaaatgatacaacgacagaaaaatgatttctgttggtgtttggtagtatcatactattgtccaaggaccaccactgttcctataaatttagcatctctaggaggaactctgataaatctttagattcttttttcataaaaaaaaatatagctcgaacgatagtggaagtgtaacagtgaaaaagaatcaaaaatcacgtgacagatcacgtgcctctcacactgccttctgctctcttctctgcccaacgacccaaggatatggacgccacgtcatcttatccaaatcacaaaagcggatccattttctctctcctctgttgggtctgatccgagaacaagatcttagccgttgttttcgatgacgaccttttagcttttttctatctctgccgtcgatcttcttcgtcttctaagagtgctcccagtttgtcgctttctttatccgtaagagtttaagaccttagtcatgagtgacacgtgtcacctgccagcatctgatttttaccagatcttccttatttccttaataaatcctttaatattcgataaaaaaaaatctgtaattcaatcttaaattaagcaaaccaatttgcacatcgtgatcattttctgattacattttgcacaatatggaaacaatataaaatccattgatgatacacttagttgaatcaaaaactaaaacatttccactttatttgtttcggttaggtcaattttaaccggtaaatttgaaaactgtaaatggcattttgttacatagagaaatcagctaatcgaaccggaaaatgcaagccggtttataatctataccggtatctcaatttggtatatttacagggggaaaaaaaccggaaccctagactcgctcgtaacagtataactgtataaggtctcattttcgtgtgctctcgtcgcgattactctctttgagctctctctctctcttctaacatcggtcttgtattggtgcttattggatatctccggcgaaggaaacgagtttcgcggttagatttttctttatcgcttaccggcgaggatgatcgtttcttcggtaaggtcgattaatcggttctgttttcgaagatgttgttgttagagttagatccgcatggttttggtgatcgttttggatcgaagacgtggttccacagacgcaaaaaatgccgtcgtctcttgctttgagatttggcttctgaaatctttcctctttcgttctcgttgaatcctaatttttgttttgtcttttttagaaatttttggtctttctaatcctggggataggttacagtctccgattgtaaatagaaatttgcggcgaggttaggaaaagttgtacagatagagattgagctctgaaacacatctcaggaacattttttgttccttgtttaaaaaagtttttttttttgtgtgtgtttctctgggttggttagaaagtggcgaagatgaatttgggtgcggccgaggaagaatcggctcaggagattcatttaccagctgatatcaattgggagatgcttgataaatccaagtttttcgttttaggcgctgctttgttttcaggggtatctggagctctttatcctgcggttttgatgaaaactcggcaacaagtgtgtcattcgcaaggttcttgtattaaaactgcgtttactcttgtgagacatgaaggtttaaggggattgtacagaggatttggaacttctttgatgggaactatccctgctcgtgctttgtacatgactgccttggaggttactaagagtaacgtaggctctgctgctgtcagcttggggttgacagaggctaaagctgctgctgttgctaatgcggttggaggtttgagtgctgcgatggctgcacagcttgtttggactcctgttgatgtggttagccaaaggcttatggttcaaggaagtgctggtcttgttaatgcatcaaggtgtaattatgttaacgggtttgatgcatttagaaagatcgttcgcgctgatggaccgaaggggttatacagagggtttgggatatcgattctgacttatgcgccgtctaatgctgtttggtgggcgtcttactctgttgcacagcggatggtttggggtggaattgggtgttatgtctgtaagaaagacgaagaaagcgggaacaatagtaccacgatgaaaccagattctaaaacgataatggctgttcaaggagttagtgctgcgattgctggaagtgtttctgctttgattacaatgccactcgacacaatcaagacgagattgcaggttcttgatggggaagatagtagtaacaacgggaagcgtggaccgagtattggacagactgtaagaaacttggttagagaaggtggatggacggcttgttatagaggattgggaccaagatgtgcttcaatgtcaatgtctgcaacaactatgatcactacctacgagttcttgaaacggctttctgctaagaaccatgacgggttttattctaaatcatagtgataacaactgggaatccacatagaagaatcttttatggaaatgtctctagttttcttacttatcttgttctttatctagctcttctgctatttcatttgtttccagtcatatgtaaggaatgtgttaaattcagttgtttttaaataaataaatgttctttccacattggcttgaattcagtttccaggtatcggttcaccataaccgtgctactaaaccgacatgatatgttgcaatgttaaaagatgacttgtaagactttatttggcaattgcagtcttacatcaataagcacacacgacaagctttgatttggcaacatgttatatttagaagtaattcatgaatcacttgcgaaagtgatatgtacaggattgtgactttatatatttcacaatgctgtctttttctttacagaagttaaattatgatcatttgttagtatttgagggacacaagtgtgtgtgtatctgtcccataagtcaacgtgttttggagcagtattttacgtttcttcttaccttatcaaaatattatatcttaaataggaaataatgcatagagactgccttgatattttgaaaaaaatattcatgaacgtgtggaagaaatggtagtattttcaagtgtatgacatcttctcagacagataaaatgagactcaaagtagaatctttcaaccttttttactttatttataagaagtgtatcaagaataagacataatctaatatatactggattcttcattaaatgttttcttaaacattgtcaactaaattgtaaaatacttcaagaatccgaatgtgtctcttcacagaaatcaatggagtggaaccagaatctgtatttttcttcgccattttcaaacagaataaggagacttcttcattgccgacacaaatgaagcaaaaacaaacatatataaatcctgaaaaaaacaaaagaggaattgaaagtttatcagaagaatcatatcactagtttagacaagagatccatggtaacagaagatgaaaaggtaatagagtgtttcaaagtgaagatcttggtcgttcttgtgatgtctaacacagacataatatgaaataaaaacactgaagttacaacaagcgaaagaactagtagtagccaaggatgacttccccttcttggtgggaacatgaacacagcaccaagatccactgtctcagatatggacagagaaatggtgcatgtctccacctccatgcatgtcattagactgaccatgaacaagcatggctcggtttatcggagttgggaaacctgaaaactggaattcagtgtgtccaaagatatcagcaccgtcggaaacagaggtgatgtctgagccagaagtggttgagctgcggtctttgttgttctgcagcatatgagcttcgaatctagacatgttggtctttctgtttacctgttggcctaacttgtcctgttcttgttctctagcagcagcctgttcggattcttgaagaagttttttggtgtttaggaatcttccaccagatcctcttggccttttaagagcatgaacatgtcgagactcatgaagatagggctgttgcaataagaaaaagaaaagatgagcaaagcaattctacgtgtatgcgtttgtttaaaatataaaccaaaatttggtaactaccttacgggctctgattagtttgttttgagcctcaagcttagcacgttgctgtctcctcctcataattgcgtggtattgcttcgcattgacaaagactggatcagtttctgtgagctctgctggtaaaggaacacgaccaggaatcatactcaccatttgaggattgcatgtctgcaaaagagattaagagacttgagatctgatggacagataaaactgaaaggtaaatctcccacttggaaacgaagggtgtacttactggtgcctgtggtaggtaagttgcagctaataaaccaccataatgtggatcagcatagtgaaatgagaaattagcctgaaccatgtataaacataagatatcagtctacaatcaaaagctttgctatgattactgtattcatagagttacaaatacctgtgcaggagcaaagtgaatattcggaaatccagtcatcgagccttgtttaggattacttgcaaaccccttccgttgagttatttcagatcctagagaaacaactgagaaagtaagaaagaggataacattctttatggcaaaaggatgattcttttgtcaatgacacaagaagtaaaacatatatataccaacaatctaacctgatttagccgaaaaggagatttgtctggaaggattatcatcaccactactagcaacttcagtataagattgaccagtggactgtgttgaagatgaatcttggtcctgaaaactgatttgctttgtagtttgtatatgcccaggtcttgaatcaaccttcaagcttagtgattcagcagaaccgcgacgattagcaacggaatcagttggaaccactccccaagagatgctagtattaaggtatggcaaagtggaatgagtagctgaatctttcttattcaacatctgatgcatcataacgtcttccttaacaagctaattattctcacaaccaacaacctaaataacaatcaaaaatgactcaaagattagatttttaaagctaataatccaagtgggtgaaaaaacccagaatagaaagaaacagaagttggaagtttctaaatttgagtaattttttaattctctaaacgaactgattcgatcgtactatcttgggtaaccaaaacacgattgcagagatcgctacgattggctaaaattagtaattttccgaccaagaaaaatttcttgttcccgtcatcacttttgggcaaaaagtcgttgacttgaagatgaattattttagcaagaatttttcagaatcagtaaacatcaatcgcacgccacaagacagatacaccaataatcgaacaaagaaaaaaggagaaaaatttgacagaaattaaacatctttttttcgaacaaagagactacagatgcagaaagaaatagataagagatagagaaagaaacctctttgagtaatcgatgaagcgaagaagaaaaacaagggatagagatttatttttgcatgtctccttttgtcaaacagaaccaaagtaaaccagtttgtctctcagagtgaatcagagagtgatcttcgtatgtaagatcttcttctttcttccttgttttggttcgtctcctctcttttacctttcctgggaaaccaacatcgccatgagaaccaccactacaccagcttctccttctgggttaattattgtcttaagtgctcttaattattcattttaaatatcttaatttatttggtctcactttaacccaaaacacagaataaggctctctggctaaccctaccttatagaatcaatttacccccaaataacgattagagcagactctttttttgaaaatctttattaatacgaaatcgtccaactatattagattcctaaattccctgacacagtttttaaattttataatttggaggaaaaacacaacaaaaatgattaacaattaaaagccaacaaataatgtaattctggaaaggtaaacgtacaattcaagatttttttttctctaaaattaatgattcctatctctacaaagccgttaagaactttacctttatttgtttttgctcatttagcagtaatgtattatgagccatgtattatatatactagtataaggtttgttttatattaacttttcccccatcttttgttacgaatataataactacggtttgttttggctgtatgatttcttaatttccattatctctaataatgattccaaaaaagtaattagctatcttggccacgttagcttttgtttgattatatttttaatttgtatgaagcttttaaaatgttatttagctttttgtccaaagtgtattgtcgtttccagactaaaaacatttctgaactctgaacagtccttaatttcccccttatgcctttactcgttagtctttagccgcccctccccatattgatgtcacacgctctcctaagctcgtgattcacacgctctcctaagctcgtgattcacacgctcttacaattttatcatgggaataaataacacgaacagttttaatttacaagttatagacctgcaaccagtttccttgagtataatagtttaatgaaagtgtaagcatgtaaaatgagatgggaaaaaggattgtataatactaaaacttaggttgggttcttaatcaagtacctaaccttttttgcaatgaaataaagctctagtgcaagtcaagcataggaatccctcctttatccttggaagtaacaagtaacaaccaaaacataataattgttacttgatgttttcttaattagtttttagcattcctttattccctctgtttaatgtttatgggcttttaagcccttgattgatccataagaattaggacacgtgggcactggatattgggtactcatcagtccgtcatcatcccatatgcaccaaaatcaaaagttattcacctttctttggaccaaaatcaaaggagattcaatgtattagtagttgttttgcaatgatatttaatgtaacatttccagtgagaacacaactcctgtgggtttggcagctccaacttttctttctccatttctagcctgatgaaataccagaatacaatctggtaaagcttgttgagcaaaaagggcagacatcgagtacaaagcagaaagaaaaaattggttctcttaaaaggaaaaaaataaaatcaagtcacaattaaaccgaaaaataccaaaccgattataaaagcaaaccgacacgaggttacatgggtagtaatttatttagttccaaaacgaaaattggtacaaatccttgtgtttagaaatctgcagatccatcatcatcttaagaattgatctccgcaccagctactttaaaacgaacccaacgtgttcaactccacacaaaattatctcgtcgcccggctccggaacttggatatgggattcgaattgcacctcatcaatttctgcgctgatgatgccagttgggatttggacaatgaccaggtgatgccatttatatggtctattattgttgtcctccatcatctctgatgattgatagagatttggtttgaggttaatccgatataacctgctaccttcacagtcccaattataagaaaacgctggaaactgtagatggaagggcttttcgcaaacaaccatgatttggacaaagaatcccacaagcttgggggcagctttaatcttaggtagtttgatcctcataggttccctccatgaggttcgcatattgttggtagaagcaattgagtatttcgttatacaaacaagtcgaaatggagcctacgtgcaaaatgagaatcaatcaagtcacaacttaaaaatatagcttatgagggggttaaagggaacagattatagagaagagagccttacctcttgagaatattcctcgttcataaagtcacgaaccagatcgctaatacattctagactgatgcaatggctaaagtccaagtggttgaaagaatgattcgaagagaagttaacatgctccagagattcgcacccatgtgcatagagatacttgaggctctctggaagatctgtcagtgaaaagattttgttgcagttgttgaggtagagagttctcataaaggataactctctgatgcttgttgggattctcctaaactcgaggctgctgagatctagatatgttaacttggtgaaatgactaagctcctctgataatgacacaagactcttacagttttcaaggctaagctcaagcaactcgtttctgcctggagctgatttttccacactaagaattcccatcaatgatccaagactcttgcatttttcaacgcaaaaatcaagcaaattgtatctgcctgcaccaagaattcccatcaatgatccgagcttcacacagccagaaagtacgagtctctccacctgagaaagttgtggcagtgccttaagtctgcgacagttactgaggctgaggtactttaacatggcaagttgtcccatggatgtgggtagatacacgaaatcatttccaccgaggtccagtgtctctaggagctgcaactgacatatgtcttcagggatgtcttcaatgtttaagtttatcagctttagctcggtcagacatggaaagtctgcaaagctaagacagctgaaattaacaggatccaacctgtaactgaaccgcttgatgtcgagtgatttcaaaccaaagaaaccagagttaagtagatgtgttactgattgatgagcggtcttctgcacagaactaaaagacagatggtctcccgtacccgagagacccgacaacttaatgaatattttcccctggatagctagatctgtcagagaactcagtgtcgcccctgaatgaggaaggttcagtataatccgtttgaggccccagcggctgaggctggcttcttgaaggtcattgacgagtatcactccctcaagaccatcacagtacatcatatttagtttcctcagatataatctattaatagactctgggatttgcaccaggctcgtacagctttccaatatcaactcttcaagatttactgcggtcgaaagttctggaagttctctgagattcctcgatcctgttacatctagtatccgtaggtttggaagcagctgaaaacaatacagcaaaacacagaattacaggaaagataggtaacaatatgacgaccttatcagaaagagtaaaacgaatatgtaatttgaatgagcataccttggttccatcccagaggctgttgagtttgctgtatcgcagactgagttcaataatggtgtgtggtcgaaagataggtggcaatatagtcaatggataggcatcccagtgtagtaacttcagattacgagaaagaacataatcatctgaaattagctgcaggttcgacacattaccacccaagtgctggaagaacttgagaaatgtgagattatgcatagggccaaaaacactattcctcaataataaagtgtcagccatttcacacaagtgcagtgacaggccttcaactcttcgagtaccctgttgataaaagcgtcaacaactgaagaaaggcatgtatatccaaaaaccatcaagattagagtggaaaacaagagcaattctaagatttactttttgaaagaacttactgtgttactgtccagtacataatggatctctgtaggatcccataaaaacctttgtttggaaggcctccagtcggattcttgacgcacaatttctcttccagtttgtactagcaagatatgcatgcttatacatccatcaattgatatgttgacgagacactttgctgctaagtgatttatccttgcatcacaatttttaagaaatgctctgatatatcggagatggccaccattaaagaaacatgccacatgaaggaaaacagtcttgtcgtattgatctaaaccgtcatagctagctctcaaaatctcttggacatttttttgagggaatgtttcaagtagagctagctcatcttcccattcatctatggccacaatagcactgagatgggaggcaaaagctacaagggcagaaggaaggccgtgagcaagccgagaagctctgataaagagttgctcaaaaccatcagaaggaggtcttcccccaaaagctaactttttaaaaacctgaagcgcatccttatcgtccaagcacttaacctcatatatattgtttactccgcaggaattgagcaaacctttgtctcgtgtggttatgatgatacggctccctggaccgaaccagcttgggtcctttgccaggccatgtaactgctccactttatcgacattatcaagcacgacaaaaactttttgatgcccgagtctctcctttatctcttgggatccagcttccatgctccataactcgacatcttcatcatagaggatatgggaaagcaattccttttgtagatgcttaatatcatagcctttagacacgttttccaaaaaacagtgagctggaaattgacgtgaaaatcgatcatagagacacttggcaatggtggatttgcctatgcctcccattccccagatccctatcatatgaacctcgtcttcacaaccaatattcagaaggagagtcatcttcatcatatgagcttccattccaactaaattaatcaaatctgtcgacttcatccttggcagtcgacttgagatgcctccaactacctcggctatcatatctgcctcatccacgctaacataggcaacacaaaaaaatacatcaaccagattgtggatggctaaggttagatcaagaaatcagcagaacattgtacttagtactctataaaagtagagaaaagaaagagagattttaccaatttctggaatgcttgcctgatagattagcgacttgggtgagagctcttctccatttagaaaccttctcctccatctccggatctgcttcgtacctttgaaaggcagtcgcgaagcttccttcctggtatctcacgtcagagggttttacgccgtagaagataggaagcactttgatctgctcctcactgtgaagctgcattatcaaccggagctcctccaagcaccacgtcgaagtagcgtagttttcagagagaataaccaccgcaaaccacgaagtttgtatagctttgactagaccatcggcaatggtgtcgccaatctcgagcttccgatcatctttaaaagtaagaactccattattacgtagagccacatacaaatggctgacgatggtttggcgggtatctacccctcgaaaactgaggaagacatcgtagtgcctgagacgagttgcagaagatgatgacgaggaagccatggaaagagaaaaatgggaaaatattctgcattcgtttgtttccccttagtattcctcgtagtttccgggtcgggtcaatttgatcacatggaggtttctgacaaagcagctgtctcggagctcccgctatgaagccacgctgaaatgatacgaatagagccaggttgatttttaaaatagttaactgaataaaaaagaaaatcaaaattgaagtgagttagtttgaagatagtttatgttatcctgttcaaaaacaaactctgctataaattaaccttaaacaatacaaaacaaaagtttatattatccttcgtacctttaagtgcacgatagttgagtagtcaaatctcgactctcgcgcactttggcagcttctactcatcgctttctttggcaaacagatacttttcgttttccatttcttcccgtttgagaattgtaattcaagaaattaacaattcgcaactctcaatctctcgttagcaatgtcttcatcctccaaatttgaagtattccttagtttctgcagcgaagacccctcaaaaacttttgtctctgttctggaccgttggttggaacaaaaagacattaccaccaatttcaaagatgactcgtttctggcagaggagtcaaaactcgcggttgttgtagtctcagagagctatccaatctctgttttgtgcctcaatcagctcgagaagatcgtaaactctcacagcgaaggtagactttccatcctccccattttctacggagttgatccttataatgttagaaaacagactggatatctcgcggaaccctttcaagagcttggtgaaggatatccagatgacaagattcaagaatggagggtttctctcactaaactcaccaacatacctgccctggattcacgatattggtaaaacacaagcttaatctgtacgtaagaatattcaagggttttttcactcggattcatgattcttttccctttatgtttttgattttatcataggagcaacgaagcggacatgattgagttaattgcaaatgaaatcttgagtatctcgaatagaaagccattaacagccaaaggtgatggactggttggtatggatcgtcagatgcaaacactctacaaattgctggatttcaaagctgctgaagaagttcgtttgataggaatttggggtccaggaggcattggcaagacgacgctagcgaggtacgcttatgaagaaatatctagcaacttcaaagttcatgtgtttgtagacaaggctgaaaagatttgtcaccaagaccgggatctgttaaagttgttaacagaaaaaggtacaacacagggtttagatgtggggattgataaaatcaaatcaacatttggacaccgaaaaggtctgatcgtgattgattgcgttgataacatcaaacagttaaaggagatagtataccttgctcactggtttattccaggaagtagagtgatctttgttacacaggacaggaacctgttagttgagtctggtgtggagcatgcttatgaagttcagtctctgagatacgacgaagctcttcaactattttctcactctgcttttgaccagcaacaccctcccactagttttgaatcactatcccttcgcgctgtccatatatcgggtttccttcctctgacacttaaaatcctcgggtcttctctacgaggcaaggatgaagagcgttgggagaaggaactgcaacaactggagggagaccaagagaaagctattatggaaatcacgagcaagagatacacaagagcaggaaaaaaagaagaagataaagagaaaatcacatcatttattctcttgagtgatgattaataagtgaatgaatcactcaagaagatattaaaaaagtgatgatctgttaatgtcaacaagttgtagatctgttgtcattaatgtataatatgacattatcactgatgaacattgcggtttatctgagattttcttattttcacctaagctaatgaagcatctcactataaagtgtgtaacttatgcaattagagattttaattaacgtatatacgttgtgaaattttgcccaaaggaaaaaaacgtattttgaaacgaaaactcaaaaaggcttaccaaagtagtgattttttctttgagatagattattgatgctccatgttgattttgtctgctgagacatattcagagattaagcgcgcaccacataaaagctactcttctgggaatttgccgatgggattcgaagccgaactcgtccaattgtttgtcttagggttcttgaaacggcagaagacaaacaagtggtctctgatggataaccactctggaggatgaattaagatttggattgaggagagacccgatcaagttacccaactccagtgaacatgaagaagacgagaattgcagatgagaagacgactctctcgcaagtaatcatgattcataaaaacctgtatttttttttatgcagaatcagatcagccggttgttttgaatttacttaccgctgatttattttggttataattcgtacaccaaattgaaccggaattcaaaacccaaatcggtcctaatataaaaccaaaatctcaaagagagtaccaaaacaaaaccgggctagaattattttcagtatgatttgggttaatgagttgactcgggaatgaactcggaggtttcatatgaaataaacaaaatagatgaaacgaaaacagcaaatcaagcagaatcatcaggtgacggggcaggcagatttgcggcggattactgggtgagaagatccagaatttgccgtctcatggcaatggcgtagagggatcaaagaaagcagaaaatttcaaaccattttgacccaccatcatcaagcttaaaacgaaggcagtggtcaacttctaaaacatgaaatgaggttctggaaaaagtttccagctagggtaacccaattgagaggtaaccttacctcttgactatgtccgtcatgtaaaatcatattcattagattcttgtgttcttcttgattcaggcgggggcaatggatacttgatcgagtgatttggggaaaaggaatcattctccagggaattggagccgtgtgcatagagatgctcaaggctcagtggaagctcttccccttctatactcttgtctgcttggccaacttcccaaatcaagcgaattccacatgattgtagctttgcggatggagacttcaactcctctgagaattgcaaatcggatttgatgcctaacttgttgatttggttgctgaagttttttaacccgcggatgataagcaggtgatctgatttaacaacttcttcctcatcttcagtgctagggtcagtactatggaaatctggtttaaggtataaacaaaagtacctttcatatccccaatcccagtcataagaaaatggcgagaattgtatatcaaagggcctctcgcaagcaatcacgacacatgcatcaaaacccagcaatttcggggacggccaaatttggggtaagtcaatcgttagggactttcctttatctatatgatcaaagtaactgggcacctcggttccaggaaagaaagcgaatcccagtgactcctattcgaggacaacaacgaaaagaaaaaaagatggagaatgatcaagttcaggttgtttgcagtggagtaatggaagaataagctggaaacatacctcttcgttttctccctcgttgagaaactgagcgatcagatgttcatcccgttttaaaccgaaacaatgactaagatcaaggtgttttacagaatggttcaaaggaagggaaacagtttccaagatttcacagccatgggcgtagagagacttgaggcacaacggaagcccttcaatcgatttgagtttcttgcacttattaaggcagagagttctcaaagaggaaagcacttcgatgctggatggcaatttctcaaattcatggctgctaagatctaaatatgatagcttgataaaatgtctaagctgatctaaaattgatcgaatgctcttgcagccatcaacccaaagctcaagccattggaatctgccacagtcttgttcagcataagaaagttccaacaatgattggaggtttatacagccagagagtttgattgtctccaactgaaccagcgctggcaatgctttgagtctgcaacagttacgaaagctggcatatttcaacctgggaagttgattcatggtttctggtaaagtctcaaaatcattgccactccagtccagtttctctaggaatttcaagccgcacacgtcatctgggatcactttaatgtttaggttgattagaattaactctttcacgcaggggaacatcgaaaggctaaaacagaggaaacttgcaccatcactgctgtacctgaacctgctgatgtctactgaagtaaatccatggaacttggatgtgggttgagattttccctgtgctttcttcaccgattcctgaccatgaaactctggcaagaactgaagtgcctgccgtgtccttgtagaaaattcaagagcttgttggttatcaggcgctagctgatccctctgcatcatccattcatgatcaagaaactctgaagtggccttaactttccgtcctttcctcataagcgatccaaaaccacataatattgtttttttacgaggttcttgttgctgctccctctttgtcaattcaccaggtgcttgttgcttctctttctttgtcaatttatcaggtccttgttgctcagtagtaaaactgagatgatctacgttgccatcaagccaaaacatctgaatatgtatgtttcctccaatagatagatttgcaatggacctcgtttccacttctttacccgagaaatacaaagcaatttgacggccgctcctattcaattcccttatagtgatataactagcaagctcctcacagtatgagacatcaagcgtcgtcaatctagtaaggtagctgatggactctggaattttcttcagcctcttgcagccttgagttatcaattcctccaaattaacggccattgaaagatctggaagttgttccagattttcagaatctgacaagtccaatcttctcaagtttggcatcccctgagcatattcaacaaagaataggaaaattgcgagaatgttaagtaccagaagatacattgttataagcatagatctgttaagagcttttaccacggtttctttccagaagcttgtgagattgctgcgatgtagaatgatttcaacaagatcttgcggctggaatcggcaagggaaggttgtcaagggaaatgcgtcccaatgtagtaacctaagccttgatgaaagtagatttgtatcgtcaccactgaaaagcagcttggacttaatatggttcgagtgcttgtagatcttgaggaatttgagagtatcgtggtacgctgtataccctcccagatgcaatgcataaaccatgtcacacatatgtagtgccatgcaattggttggttcgcttgtctgtgggattaaatacgataaaattagttggcctacgaacaagcttagtgcagaaacaaccatgaacaacaacgatgttacagatagacactgtaagtgcttaccgtgttacgtttcagtaattcataaatttcataaggattccacaaaactcctcgtccatggcgcctctgcatggattcttgattaacaattgctcttgcagtttggtctaccaaattatgcatctttatatacccactggctgttatttcaatgagagacttctcagccaatatttttaatcccagacaaccctgtagtacaccatcatcgagaagggtagtggcacgccggagaggttctccattaaagagacatgctacatgaaggaatacatttttatctgtttcctctaatccatcgtagctaattttcaagatctccataacactttcatcaggagcttctataaatctacataatgcatcgtcccactcctttaaagatgtcattcttcggaaaaataatccataagcttcaatagcgactggaagaccttgagcaagccaagacgctcggattgacagtttttcataaagttcagaaggaggaagcgctcctttgaaagccaactggttaaataactgaagagcagcatcattatccatgcacttaacttcatatacagttcttactccgtatgtattgagcaagcccttgtctcgtgttgttatgattattcgactgcctggcccaaaccagctcgactcttgagcaaaagcatgcatttgtctcatgtcatccacattatcaaggacaacaaagactttacgacatccaaacctcgccttaatctcctggggtccaagttttacgcccgaacccttcatcttcttcttagacagaccaagtgtagttgaaagaaacttttctgctaaagacgagacaccaccctttctataaatcttggaaacgttttcaaggaaacaacgagctggaaatccctgtgaaaactggtcaaagagacacttggcaatggtggttttgccgatgcctcccattccccagattcctatcatacgaacctcattctcagagtccatactcaatagaggactcaggcgctccatgtgagcgttcatccctacgatgtcgctgaaatctactggctgcataatcaacaacttttttgaaatgtctttaacaatctcttcaatcatcgacgcctcgtcttcactagaatatagaacatgataagaataattattatcagttccatcgatattgtacactaaaaaccatatgttggtggtgaaaacttaccaagtttcaaaatcctttcctgctaaactggcgatctgggtgagagcttctctccaagttgtgaccttgttaggcattttagagtcttggtacttgtcaaatgtgaaactcccagtctgatgtctcacgtgagaaggatcaactccatagaaaatggggacaactttaatcttattctttaggtgaagatccattaccatgcggagctcgtccaagcaccaactagatgaagcgtagttctccgatagaatcacaagagcatatgtagagttttgaatggctctgctgatttcttcggagatggagtcgccgagctcaagctttttatcatctttgaacgtaacaactcccttatcgacaagttgtttgtgcaaatgactgacaatgttcttgcgggtgtcttctccccggaaactcaagaacacatcgtacttccagataggagatgaagaagatgaagccattagtctctctctttatggatcaactatttggccaagaaggaggatgaagaaatcatatcaagttcttagtacaagataatcatattgtcacaaacttgcacgttgtccgtataatgatttcaaatccatggttcaataagaccctcccccaagccaccctgttgtaacacagttgcacgtcgtcaattcgttgacttttggaagccaaactctctagatattacaaggcgtcattaactacatcaatatctcatttctttggtcaaaattcaggcatcaatcatctatctctccactatcgataatcatggcttcttcttcctcctcatcagagcataaagtgttcctgagttttagaagagaggacaccggtagaacttttgtcagccatctataccgttcgttggatcaaaaagaaattcgaacttacaaatttgaaaaccagcaggcgggagacggaaagaggatatcttctgaggtcaagcaggctatcaacgagtctaggattgctgtcgttgtgatatcggagaactacgtctcttccgtcttgtgcttggacgtactcgcgaagataattgagcgtttgcctctcatcaaaatcgaaacagtcttctacgaagtggatccgggggatttgacaagaccaactggtaaattcgccgacgacttcaggaggcatgaagcgagagaaaatcggagaaccgtgaatcgttggagggatgcactggaccaattggttagcatcaccaacagtaatttttgttcgcgcaattggtaatcaccgattactgtagtggtttttttattgtagtggtttcttttattgttttacttttaaaaaatttgctaactcatagggggtgattggctagttcaaagctttaaaaagagtttaaagtctttccaattttttttttgctaattagactttttttgctttatttattttgaaagttttaaaaacctttttttttaaaagtcccataaactaaactttttcaaacaaaataattctcaaaagttttttttatattctttccaacataattaaaactctctacaagttacatatatttttttaagaaatcatagtaaaatagtctcttaacctttctccaaaagtcctatatattttatgttttttgacagggaggatgattccaagatgatcgatgatctaatcatcagactaatcaatatttatttttctaaatactacacaccggacgtagatataatcgcagaaacgacagttggcctagacgcgagcgttctgggattgatgacagatatcgatatgaagtacaaactcaacagtctgtctgggtctgtagaatctggatttggacttgagagatatgcacttgaagccacatctgttatggacgatatgtcaaatgaatcgccttctcccacatctgacgactccaacggtcttgttgggatgtatcgtcataagaaagcggtctatggattgcttgatttggaatctaagaaccaggtccgtacaattggcatttggggtttccaaggcgtcgggaaaacgacacttgctgaatgtgttttcgacgacatctcaagccactttcaacactactgcttcctaaccaatgccaataaaatctatcagaaccgcatctcaccaagtttactaaaacatcttacaaggagaaggagttctgaagacatatttgatgccatcaaaccaagtcttgtaaaccgaaaagtcctgtttgttgttgatggtgttgatgctacttacaatgaacaatttaacgatgccatgaaggttacccgttggctcggtcctggcagtagaattatcatgacatctagattcaagtcttcgcttaagttcggtggggcaaaatacgagatggagtgtctgagatatgaggaagctctacaactcttctctctatacgctttcaagaaaacttaccctcttattggttttgaactattctccattcgtgctgtccactttgctggacgtcttcctctgtccctgaaagtactcggttcatttctatatgataaagacgaagagagttggaaaagaacattgcacaagctagaagcatcacaagataacgatcgtcgttatgtctctaactacatcggggcaggtgaataccttccaagacgtcaaatagaattggaacaatatgtaagtccagatgaagaagaatattcaccttcatatatcatgtcactttgacaatcaaagtgcataagcctactcgaaacatttggttatgtttctgttatctatgttgttcgctcattatattaatgttgttcagcatttaataagactaacaggggggggagtggtcttgtccctcttgtagtacctggatagtgcaaggtgttagtatctatgcaaaagttgcaatttacatttatacttcttgtatcctgaaatgcgattcctaggtgttgtcgtgaaggactgagatcgaagaagataaaatgtgagacaagatgcttgccagagatttgagacttaaaagtagtgcaatgacatgattcaatatcattctgctcagatttaaccgatagccaaagagatgcgttaattacaaactatcagccatagtatttaggtaaaagatcgttcttctcaatcaaaaggtttacaaattgtctgaattcgaaatagagaaaacgcagaccgaccttttttccgattacaaaggttaaaacagctagtgacaaacaaataagccaacaagagcaacccagacttgtagggagatcaaataaataaaataaacaaaagggttaagatgacaacaagaccacaagaacaaacaaattgcagaatccagtaaatcagatttgttgggagagttttggccaaatcatgtaacataatttacgagtatgacctttttcattgatcagagttaagggctttggagatccattctgatgctgcggcttgagtttctgaatccgtttttggaaggagagaaaatggagtcacggaaacctgccattaccaaaaggaaggaatttagaatccaaatacgttttccttagaaatatctagagacttaagactttaaccaaacaagatgtttcatgatgagcgcaactgttgatttagaaaagagcaggatgcagaaaaagagaatggatgtatgatcatgccaacttacgaaaccatcttctagagccttgacatccaaatcttcatctgtgtgttcttgttctttagcaagaaactgcaaaatatatacaagtcggaatcttaaacacaatggtacacattgaatatccaaaggatttgtgaagagaatggttccaagtttttctttacctctagacgaaagaatttcttaacacgggtatcagttttaccagcaacaccaactgattcaatttctacaatactcttcttctgagtggtaaaacgacgagccgccccctgaaattgccagatatcttaaaatcagagtcgaatttacaaatcttgcaccttctgaaccaaactaatataaaaacagaaaagtctaggtatgagactcctgaataaggaataaactcacagccgctgaagcatccctgccaagctgggcaagctgagcccctaaactttgttggttggacatgaaattcccagcaccagggtgacgattagctgaaacagcttgccaactaggatactgcctccacatgctttgctttgttaccttgaaaccctgttcatatgtagacgaagcatcaatttccctaattcattgaccttttcacaacatcaaagaatatagtaaccattgcaagcatagatcatgttcttagcatacaaaaatcgaaccaaatatctgtttctgagacgagttatgttaagaatacaaaccttgtttgatgagggtgatgttggaatttctatgttgagagagcagtctttagggaaaactcctttcgcaatgtctctgatagttgcgtttatcaaaggtaagcagacaccaacagcatccttaaagtgactttcttggctttcatttttcttcctataatcgatacgaaaaattattgccaacaaatccaaacatgtagcagcaggcatttccacgatatactcaccaattcaacgatattgacaaagagggtaccccagaaatcaaagcctccctgcctccagcaactgcacctgaatagaacctggaggattctcaaatcaggaaacacagaggaaacgaccagacaaggaataaccacttatttacaagataaatgcacttacatttgatggccacagcttgatccctgattaattccactaattacctgaagataataagcaaaggcacagatacaaaaattaaaaaataccaaattgtcatacagtcaaatgataagattgtcaaaatgctaaccagtataggttttgaccaagcaaaaagcgctccagataatcctaatgagatgcagtccacaggagtccctgagacaaaagaataatttcaaagccaatgaacaaaaacggtactcacaccacatgtcctaaaacaagatcaatgaatcttcttgtttcagcaaagactccaactttcacattccatacacttattgtcaagcttatagatgttgtgaaacttcaaaaaccagtactaataaccatttcaatcaaaatccgcatacctgaaacttcaaaggctgtggcacctttgagttttacagagcttacagcgattgtttctcctggagtagtagaatgagcagaggctgatttgtccctgcaaattccaattcaccataaagttcagaaatttaaccaaaacatgatataaacacacaaagtgaacaaatcaaaatcaaattaacaatcaaaaggagaaactttacgtttgaggagcacaaacatgaacattgtaaagcccttcgagaaccaaagcctcaacgagagaaacaagccctggcgaatcaatcccatcaccattcgtaactaaaacaataggtctagaatcatcgatctcttcctccaccgacgcaacatcaacggaatcagatgtagacggagcctcctccgccgatccatcgcttccaactttttcctcatttcctacttttctcttcgaaagcacatcttggagattcgaaacgagcgcagctgacaaaccattgttcttcgaggtcatcgtaaagacacgagagaaattgatttgggtctgtgttgaaagaatcaaaaaccctaacgagaacacgaagaagaataaaattagaacagagagaacgggtctaacggagttttcgtagagagagagaggagaagaaagagagatactttaattggtagagagagaaagcttgaagaagagattacttgtgaactgtaacaatttgagtttcctccgcttagatagagaagaagaaagaagaagaacaatgacgcgcaatttattttcagacaaaaacaaatattattaaaattcaatccgaaaccatccaataggaaattaggaaactgtttttgtaaatattaaaataatattttaaattaaaataatattttaattatgcataaagacatatagattatagatcttgaacaatttatttatgtatttttggtaatattaattgttttattctcactatggtcaaaaagatgaaacatattataaatggtccacatctaataattatacagttatcagatgtaataagaagaattatgacatacatttaaagatattggaaaaatatagtttgaaccgacaacattatagtaccatgttggttgcaaaattaaaaatgttaattgttgctagatcatatgctagttaaatattttttatttctgtcaaaaattagccttttgagttaagtaagtttagattaggatatagtagcaaattaaaatctgttataggtgatgggaaaaattagcatttctaagtttgtctatttggtagcttactccaactccaactaatagttgattttgttagttagcattacttattaatgataaatgattttgagcttattatggatggcaaaatattgtagggtctcaaagtcaacaaacgaattagaaaacgtcaatgcgagggttatggagtgattgtgagaattgtcttcgtaatcataaaatgtcaaaggttagctccttttgttttgataattgaagtgatcgtcacgtcgtgataattattcttgtattcgatgacattcattgtttaaaggaaaacataaagattgacccaaataaagagaggaatacatcttgtaaaaaaaggaatgcataaaccgttgtaaagtgaaacgaattggagtatttatttttgcaccttatccttagtccgcttaacaaattaaaaaaaaaaaaaactattttagttgtctcaaatatttgggctttcttttgctttttagtctttagatcttttaacagttggctacaaacacttctagaactttacagatatagaagaataatggggaaaaaatgtaatgcttgataatcaaattcaaaggtaagaagtaaaaactaagaagaatggttcattgtgttctctttcatttttggatggacttttcattctgtttctagtttatgcattgctaggaaatgtgttgggccaaacttaagtagcccacaagaataatgcagaccaaaaaaaaaagcctgactattcgattaacggtcgacaaacattattccattatacactactttgacaaaaaaaaaattttaaaaaaattgtgtttatctaatgccaattcaccttcggtaatcactttttattcaacaaatagcattggaatcgtcaaaaatcaatttatccacaagtattttttttgttcaattatgcgtcaaaatcttatcaaacttgtatttaacattttgccattttttgaattttctttaaatacttgcgaaaacttttgtaacttgtgtttgtggttactctagtttgaatgtcttaccagtttccgtgtacaaaagtaaattagaaaaatttacagagaaatttcacaactttatcgacttttcaaactaaagaaatcagatcaaatgtttagcttatgactctttctccttatgagttggtaatatctttgactcttgctcttgaataagaaaaacaatgtatccggccaaaaaaaaaaaaaaaactgcatatgactttattgaataaagcacgaagaaattggtcatggccagttggccactttaaattgaatgatagtatagataatgaaaaatatttggtcgagattataactgtacgtacggtcgacgaacatatgactcggcaatgtatagtagcatacgttaactacgttgcgaactcgatgattgtctacagaacaaaacgtataaaatatgttcgaatctttcaacggcgaatactttcagcaaacaaaacgtttttattaaattataaggtacaaatacacaaatatatctccagattctgtgacgtcgcatgtgttatacaaaataaatgaataattactttagaatatatgattgcgacaaaaacaattccaagattttatccaaatttatttttcaactttaggatggttgattggttatatgggcgtttacacgtaaacatgtctctaaatgtaaatttcacgtgatttaaaacaattttctgatgatttaagataaactcggtttttcagcgtaaatttcacgtgatctagaaggatgtacggtggcgtctagtcctggtttggactatggctctgttcgtttgcctgtcgctggcgactaaaaccagcgacaacaaccaaaagttgttcgtttgcctgtcgctggttcagcgaccaaaagtagcgacagtcgccagcgatcagcgaccgcaatttttggtcgctgaaatttttagcgatcagtcgctggtttcagcgattagtcgctgcttttggtcgctggatccagcgacaagcaaacgaacaacttagcgatcaaaaaatataaattaataaataattaaaaataattaaattaaattaaatttaaataaatgtctttttgcactctgaacggttgtgtcttttaatcgcaactttttgtaaaaaatattgacggttgttttttctcgcttgtgtcttttattgcaaccttcctatattgtaattctctgtcaaaatatttacggttattttttccggttagttatatatatactattgaataactacaaaatttataatatgcatcatttggagttagatttgttttaaagaaattattatataaacaaatttataatatttttctctgcgatatcacgaagggtttgagttctagtttaattaaaataattcttattaaattaagttaaaataaattaaattcaaataacataaactaattatagtaaaattaaatttgataaaactaaaataaataaatatattaatttatttttctcatggtgtaggatatatatgatttatattttgattttaaaatataaattagcaccaaaataattaatttaaaaaaaaaatatagcgactgtttataacgacaatcaaacgaacaacacatcgacaattattagcgattgtcgctgtaattggtcgttgaatctagcgacagacaaacgaacaatgtatgttgtcgattgttgctgtcgctggatccagcgacagagaaacgaacagggcatatgccttcgaaaatatctcatgttagggttaggccatgcaaatatattggacacttattttattttaatatgtggtctgaacttatttctttttgaacaaaaacaagaatattgttgtttaaaatttccatgaaatgattaagcaatacatatacaccacagaaaacaaactcagcttcttcttagctaagcaggcttaaggggcggctggacttatctataataaaaatttgagtatctaaacgaataaattggagatattcttttagtgttatcctaattatagttataaaacaattataaccttagaaagtttcttggaaatttaatggtaatttcattaccgtaaatagtttttctttcttcttcacgttttttttttttttttgttaaacttcttttctttctctataaaaactaaaaagcaaacttctcctttttggtacacttgccaaatgctctcaagctcaaattagcccaataaagagagaaaaacaaaacaataaaaatattaaaaatcatgaacacgatctttaaaaaattatcctgttttaagaaaaaggttaaatctttacgaatattcgaatccaggtcactctcttcttcgtcttcttcctcattcactcctcaaaagttcgacgtttttctaagcttcagaggcaaagatactcgcaagaacttcgtcagttttctctacaaggcgctagtatcaaaagggattcgaactttcaaagacgacgaggaattggagagaggccgtccgattccgccggagcttcgccaagcaatcaaagggtcgagaatcgccgtggtcgtggtctctgtaacttaccctgcctcgtcctggtgtctcgaagaactcagggagattctgaaacttgagaagctgggtttgctcactgtaatacccattttctatgagattaatccttcagacgtgaggagacagagcggagtagtctcaaaacagttcaagaagcatgagaagagacagagcagagaaagagtcaaatcgtggagggaagcgttgaccaaattggctagtctctccggcgagtgttcaaagaattggtataaatctctgaaactttcttaaagattgatgaatcgggtcgatagtttcagattgaaatctgttgaatagtttctcaaagtttcgattttttctctgtttctcaaatttaaggtctttgtctctgtttctgttttagggaagatctgtcgaatcgtttctcaaagtttcgatttttatctctgtttctcaaagttaggatcattgtttctgtttctcaaagttagggtcttcgtctctgtttctcaaaattaggatcattgtctctgtttctcaaagttagggtcttcgtctctgtttctcaaggttaggtctttttgtctctgtttctcaaggttaggtctttttgtctctgtttctcaaggttaggatcattgtctctgtttcttaaggttagggtctttgtgtctctgtttctcaagcttaggatctttgtctctgtttctgtttcagggaagatgactcgaagctggtcgatggaattactgagaagatatcaacaaagttgttctcggaaaaaccaaggaatgataatatcctaattggtatcgaccaacacatgggggaattgtatccactatttaacctgaattcgaatgaagatgttcaagtcattgggatttggggaagaggaagtaatggtagatcagcactagcaagccacgtttaccaaaacatcaaacatcactttgaagctcattgttttctcgaagacgtgagacggatttcgctacatttccgtgactctcatttacaagatgagcttctttcaaatatgcaaggagaaggtttgacaacaaagaactgtcataggtgtcttaagactatcaaagcaaggctaaggaacaagaaggttcttcttgtggcgaacgatgtagacaaacttgaacaatttgatgcacttgctgaagaatttagctggtttggtcctggaagcagaatcatcataaccacacaagatagacaattgcttatttcatcagtagtgaggagtgtctacgaagttaagctcttgagatgttacgcagttcgtgagctctttaggtcaaatgccttcaaagaaagagaaagagacgatcctgttgggttcgaccagtctacatatcgagccatgtatatatcaggtcatgtgtttttgaccttgagatatattttcactttgttgtgtgatagaggtcaacttagagaaaggataaatgcaatagtacatagtctttagattcattaatccttttagatacaaggtgttgtatttaggtcgaataagttggttagattcaggaatattaacttaatgtgtttgtttgttctatagtgaatgttacgccatttttttacatatggatgtgccacttgtgtatggatttgtgtactatccatttggtaaactattttattcttaagacggttcacaacaaattcatttaaacttgtaattgttttataaattacctatatcaatctcgtccgtcagttgacttagttgtaaccaccagaaaagtaagatgataatttatgtttatccatgttcattttcttattttggcggctcatcttctctttctgagtagtttagtgaaacagaagctgacaaacaaaaaatgaaaatgccaggaaacacacactagagcagaagactcctagttcaacttctcttgtgttaatgtgcctataaatatcctttgagatattcatagagtatcagaaataaaaaaaaatgtcttctgctactgcgacttataactacgatgtttttctgagtttcagaggacccgacactcgccgcaagttcatcagctttctctacaaagaacttgttggaagggacattcgaacctttaaagacgacaaagagctagagaatggccagatgatttctccggagctcatactcgccatcgaggattcgagatttgccgtcgttgttgtctccgtgaactacgctgcgtcttcttggtgtctcgatgagctcgtaaagatcatggatatccagaagaacaagggttccatcaccgtgatgcctatcttctacggcgtgaatccgtgtcatttgaggaggcaaatcggagatgtcgctgaacagtttaagaagcacgaggcaagagaaaaagatcttgagaaagtgcttaaatggaggcaagcgttggccgctttggcagatatctccggcgattgttcagggtgaaatttcttaacttggtgataaagattgaattgaattttaaccaagtcgccttggtccagtggtaaaaggaagataattcccgccacctggtttgatggtttccccggacactaagattagtcttccggtttaggaaaaaaaatagattgaatttttattgttagatatgatttgaagagatgctaagtttcgattattttttattttttttgtctatgtagggaagatgactcgaagctggtggacgtaatcgctgacaagatatcaaaagagctgatgatagttacaagaataagcaatgggaggaacctagttgggattgataaacacatgaacgaacttaaccgattgatggatttgaattccaacaaaggtaagagaatggttgggatttgggcaagaggaggaagttgtagatcggctctagctaaatatgtttatcagacatcctgtcaacactttgatagccattgttttcttggaaacgtgaaacggatttgtcagggtaactactttgaaagccatctacacaaagagtttctggataatattcaaggagaaaactctagcaaacaaagtctcaagaagcaaaaggttctgcttgtggcagacgacgtcgataagcttgaacagttagatgctcttgcaggggatttcagcggttttggtccggggagtgttgttatcatcactacaaaagataagcagttgttgatttcttatggtatacagcttgtctacgaagctgagtttttgacattccagaaattttgtcgtagcttccgatcattggcctttaaaaagagagacgacatttctgctgcgttcgagtgggctttgtatatataaagcaatgaattttgccacggaatgttttagctctcaaagtagaagatctggttatgagaaagtgttggaatcagtttaataagttagatcccttgagtcatatgcattaagttaactaaacttaataagttgtgtggctttcaaataaggttgttttgtctatttttggagtgggttctcttggggtgtataaaaatgtcactcttcattggattaaataatatacaaattttttttgttataatcaaatttgtgtattttagttataacctaaatgttgtatgtctctttctagacttaagaactaaagtctatgttttccttaaaaacaaagtttgtataatttcttgggattcccatgaccatttgttctttgaatacccgaattctcaaaggcagtttggttgtccctcgcatcacatgttttccatagccctcttctgcacttgctaaagaagttaattggtttggtcttggaagcagaatcttcataacaacacaagacatgcaattgcttatttcatcaatagtggggagcgtctacgaagttgagcttttgagatgttacaaagttcgacagctatttaggttagatgccttcaaacaaagagaggatcatgttggttttgagcagtctacagagtttttaagaatgttagagcaccctaaatgggggtttctaaacaagtttcttaacaaagaataaaaaatttatatgatttaaatattacataagtctcttaaatttgatgaaacttaggcaaattgtctcttagttaagagataattggtcttggtttcaccaaatttaagagacctataattaaaaatattatttatctatacttacactttaattttgtttaagagacttaggcttagagactaccattgaggatgctcttaaacaaccatttttaacatctggatgtactagttgtttgtaatactgttctttccttataagaaataaagaatacaccatttgaaacctgaaagatggccaagcttgaggcctattaaccactccaactagaaccacgtcctccacaacacagacaactctgcggctaaccatactctccaccgcccagacaacgcaaagaaaatgggcttccaatttagttttaatgtttgtgaatgccggatgactatgcagcaaaacatgtcctgattcctctcttagaactcagtagacaactgccacaaagtttcttttagaccaggagaagccaatattacactgagccctttgacttgtaccagaaaacacataagtgacataaccagtagggctagtccctgtttcaagagaatttctttcagactacacttcctacgcagcaaaccaatcatccacatcctctctcactttctttatggtttccaaagcagagaatgtttttccttcaaaaaacatgaggtttctatttttccaaattctccaaataatccatgggaaggggcatgataatgtgacatgcctcaaatttgtctagagaaaatagactctccatcaagaccacaagttggcatctgcagtccattttcacacccctatgcgtcagaagatccataacatgtacaactccacttagaatcttccaaagaaaaacattaatttttggttttagtcttgagcttccaaacttaatgttttaactcgttggttgaaagttgcacatttgcttaatcatccttatcaattagcctttctcgtccgtcaattgacttagttctaaccattcgtttgatcgataatcaaacaaacatttgaatcttcttcaaccaattaaattagactacgagtaactaaatgccaatacacgagaaaagtaagaggagaatttgtgttcgttaatatgttatccatactcattatcttactttggcggcccatctattctcttccctctttctgagtagtttagtgaaacagaagctgacaagaaaaaatagaaaatgccaggaaacacacagttagcagtaggaagactctttgttctaggatgactcttataggtcaactcctgtagtggtagtgcctataaatatccttgagttctttatttctatcactcattgagaatcaaaaatcaaaatgtcttctcatactgcaactaagtacgatgttttcctaagtttcagagggcatgacactcgccagaacttcatcagttttctctacaaagaactggttcgaaggagcattcgaaccttcaaagacgacaaagagctggagaatggccagaggatttcgtcggagctcaaacgcaccatcgaggtgtcaagattcgccgtcgttgttgtctcagagacctatgctgcgtcttcttggtgtctcgatgagctcgtaacgatcatggatttcgaaaaaaagggttccatcaccgtgatgcccatcttctacggcgtggaaccgaatcatgtgaggtggcagaccggagtactcgctgaacagtttaagaaacatgggagtagagaagatcatgagaaagtgcttaaatggaggcaagcattgaccaattttgcgcaactctccggcgattgttcagggtgaaatttcgtaacttgattttttttttgagttgaatcaaaaagattgaattttttattgtttgatttgaatcgatgctaaagtttggatttttttttttgtctctgtagtgatgatgactcgaagctggtggacaaaattgctaacgagatatcaaacaagaagacgatttatgcaacaataaacaatgggaagaatctagttgggattgatacacacatgaaggaactaaaccgattaatgcatatgaattgcaacaaagttactgtaagaatggttgggatttgggcaagaggaggcgatggtagatcagctctagctaaatatgtttatcagacatcttgtcaacagtttgacagccattgttttcttggaaacgtgaaaacgatttctcagggtcgccactcagcgcatctacacgacgagtttctgagaaatattaaaagagaagactctaacaaacaatgtcttaagaatcaaaaggttctgcttgtggcagacaacgttactaaggttaaacagttagaagctcttgcaggggatttcagcagttttggtcctgggagtgttgttattatcactacagacaacaaggggttgttgaattcttatggtataacagatgtctacgaagttgagcatttgaagttttgtggaatcttacgatcattgggctttaaaaagagagctgctgcgttccagcgggctttgtgtagagcaaagagttttgccacggaatgtttttgttgtcaaagtagtagtatatctggttatgggaaagtgacagatttagtttaattaagttgaatcccttattagtcatatgcattaagttaagtaaacttaataagttgtgtggcttagaaataatattgttttgtctatttttggagtgggttgctcttggggtgtagaaaaatgtcactcttcattggattaagtaatatacatttttttgttccttagtttttaagacatttttttacatctggatgtgccagttgtttgtaatatactgttctttccttatagaaataaatattacacaattttttaaaaaagatttatgtatttgggagggttttttgatgtttggacatgcccaataaaattaaaaattaatacaggagacacaaagtcgctaactttccaaagttggaatctacatatgtctaaaacagagaagaaaagcttttaaactttttacatgacgatcctccaataatagtaatacactactacagttcaaagccactgacaagtttctcgcttttttcccttaatgagaaactcttttaacctgcttttctgatttatgctctttgggtacgtggaagatttcaatcacagactaacgtaattaaatcatttattggaaactgtgagtcaagctgaataaacttgatgcaaacgaatagatatgaaagaaattgggttgatcaacaaaaaaacaagccgacaaaaactgaatctcatgatatgttttcgtccgtcagttttaaccgttcgtttgatcggataatcaaaaccagtaaatgccaataatacacaccagaaaagtaagatgataatttttgttcgttagtagtattttattattatcatgctcatcattttcttactttggcggcccatcttttctcttcccctctttctgagtagtttagtaaaacagaacctgacagaaaaaaatagaaaatgccaggaaacacacacttagcaggaagactatgggagtctctaaccaatgcacatgctttatttagttcaactactctctagtggtctataaatatcgttgagttctttatttctattactcatcatagttctcaatagagagaatcaaaaatcaaaatgtcttctcctactgcgactaagtacgacgtctttctgagtttcagaggactcgacactcgtcgcaacttcatcagttttctctacaaagaactcgttcgaagaaaaattcgaactttcaaagacgacaaggagctcgagaatggccggaggatttctccggagctcaaacgcgccatcgaggagtcgaaattcgccgtcgttgtggtctctgtgaactacgctgcgtctccttggtgtctcgatgagcttgtgaagattatggatttcgaaaacaagggttccatcaccgtgatgcctatcttctacggcgtggatccttgtcatttgaggaggcagatcggagatgtcgctgaacagtttaagaagcacgaggctagagaagaagatcatgagaaagtagcttcgtggagacgagcattgaccagtttagcgagtatctccggcgaatgttcattgaaatggtgaaatttcgtagcgttggttagaaagattggatttttatttgatatgtctcgttactaaagtttcgatttttattttgttttctctctgtagggaagatgaagcgaatctggtggacgaaattgctgacaagatatcaaaaaatctgatgactgttacaacaataagcaatgggagggacctagttgggattgatacacacatgaaggctcttaacaaaaaattggatttgaattccaacaaaagtttgagagtggttgggatttgggcaagaggatacaatggtagatcagctttagctaaatatgtttatcaagacatctgtcattggttgaaggttggttggttgaaggtttatcaagatatcaagacagcttccaaactttatgttttaactcgttggttgaaggttgcacatttgcttcatagatcacatcactcttttaaaactgagtagccagccaatcaataacccgaatttcactgagaaatccccacatttgttatgtttccatactacaaaatcatctattgacaccactagttagctgtgatcttataaagatgagtaagccaaccaaaccaataacccaaattggaaaatgtgagtcaagccgaataaacttgatgtaataacctattcgttctaacttgaaattgttattaaaatcatccttatcaattagcctttctcgtccgtcaattgacttagttctaaccattcgtttgatcgataatcaaacaaacagttgaatcttcttcaaccaattaaattagactacgagtaactaaatgccaatacacgagaaaactagactaagaggagaatttgtgttcgttaatatgttatccatactcattatcttattttggcggcccatctattctcttccctctttctgagtagtttagtgaaacagaagctgacaagaaaaaatagaaaatgccaggaaacacacagttagcagtaggaagactcttataggtcaacttctgtagtggtagtgcctataaatatccttgagttttttatttctatcactcattgagaatcaaaaatcaaaatgtcttctcatactgcaactaagtatgatgttttcctaagtttcagagggcatgacactcgccacaacttcatcagttttctctacaaagaactggttcgaaggagcattcgaaccttcaaagacgacaaagagctggagaatggccagaggttttcgccggagctcaaaagccccatcgaggtgtcaagattcgccgtcgttgttgtctcagagaactatgctgcgtcttcttggtgtctcgatgagctcgtaacgatcatggatttcgaaaaaaagggttccatcaccgtgatgcccatcttctacggcgtggaaccgaatcatgtgaggtggcagaccggagtactcgctgaacagtttaagaaacatgcgagtagagaagatcctgagaaagttcttaaatggaggcaagcattgaccaattttgcgcaactctccggcgattgttcagggtgaaatttcgtaacttggtgataaagattgattttttttagggtttgttaagatttgagttgaatcaaaaagattgaatttttttattgtttgatttgaatcgatgctaaagtttggatttttttgttttgtctctgtagtgatgatgactcgaagctggtggacaaaattgctaacgagatatcaaacaagaagacgatttatgcaacaatatgatgagtccagacgagaagaagaagaagaaaggagaaggcccataaggactcgcatgcccaatccaaagtattcccaacactaagtcattttacttagtctctgttttcgatttagttacaataagcaaggagtcttccacgattacagtttccatcttttccaagtttgtagaagttgttactccacgtttgtttccatgttgtttctagttgtaaggaggtgtactccaagtatttatatcaatgaaaaacaaaacaaaaggtagtcttaactaacaatcgtttatcaattctaagaactagaattctctttggttttgaagagggaccattacaataaacaatgggaagaatctagttgggattgatacacacatgaaggaactaatcagctctagctaaatatgtttatcagacatcttgtcaacagtttgacagccattgttttcttggaaacgtgaaaacgatttctctaccaagtgtcgttagctcaattggtaaagaccttaagcgaaagcttcgcttagggtcgccggttcgagtgacgcttgagacgaaactaatattacatgatgtggtttcgggtctgggtggattacgggtttcgttcagaacctcctggatttcaacaaaaaaaaaaaaaaaaaaaaacgatttctcagggtcgccactcatctacacgacgagttttgagaaatattaaaagagaagactctaacaaacaatgtcttaagaatcaaaaggttctgcttgtggcagacgacgttactaaggttaaacagttagaagctcttgcagatgatttcagcagttttggtcctgggagtgttgttatcatcactacagacaacaaggggttgttgaattcttatggtataaaagaagtctacgaagttgagaatttgaagttttgtggaatcttacgatcattgggctttaaaaagagagctgctgcgttccagcgggctttgtgtagagcaaatagttttgccacggaatgtttttgttgtcaaagtagtagtatatctggttatgggaaagtgacagattcagttaattaagtttaaattccttagtcacatgcactaagttagctaaacttaataagatgtgtggctaggggtgtaaaacaaatatcactcttcattaaattaagtaatatacacttttttttccttatcaaatctgtgtttgagttataacctaaatgtttgttgtgtgtctctttcaagtctatattttcttaaaaacaaagtttgtataatttcttgggattcccatgaccatttgttctttgaatacccgaattctcaaaggcagtttggttgtcaaataaagattacacaatttataaaaaaagatttgtgtatttgggagggtttttgatgtttggacatgcccaataaaattaaaaattaatacaggagacacaaagtcgcaaactttccaaagttggaatctacatatgtctaaaacagagaagaaaagcttttaaactttttacatgatgatcctccaataatagtaatagtgtaatggtactatactactacagttcaaagccactgatttatgctttttgggtacgtggaagatttcaatcacagacaaacgtaattaaatcatttattggaaaatgtgagtcaagctgaataaacttgatgcacacgaatagatatgaaagaaattgggttgatcaacaaaaaaacaagccgacaaaaactgaatcttatgatcttttttcgtccgtcagtttcaaccattcgtttgatcggataatcaaaaccagcaaatgccaataatacacaccagaaaaggtaagatgataatttttgttcgttagtagtattttattattatcatgctcatcattttcttactttggcggcccatcttttctcttcccctctttctgagtagtttagcaaaacagaagctgacaagaaaaaaatagaacatgcctggaaatacacaattacaccactttagcaggaagactatgggagtctctaatcaatgcacatgctttattcagttcaactactctctagtggtctataaatatccttgagtcctttatttctattactcatcatacttaagttctcaatagagagaatcaaaaatcaaaatgacttctcctactgcgactaagtatgatgtctttctgagtttcagaggagtcgacactcgtcgcaacttcatcagttttctctacaaagaattcgttcgaaggaaaattcgaactttcaaagacgacaaggagcttgagaatggccggaggatttctccggagctcaaacgcgccatcgaggagtcgaaattcgccgtcgttgttgtctctgtaaactacgctgcgtctccttggtgtctcgatgagcttgtgaagattatggatttcgaaaacaagggttccatcaccgtgatgcctatcttctacggtgtggatccgtgtcatttgaggaggcagatcggagatgtcgctgaacagtttaagaagcacgaggctagagaagaagatcatgagaaagttgcttcgtggagacgagcattgaccagtttggctagtatctccggagattgttcatccaaatggtgaaatttcgtagctttggttataaagattggatttttatttgatttgaatcgttactaaagtttcgttttttattttgttttctctctgtagtgaagatgaagcgaagctggtggacgaaattgctgacaagatatcaaaaaatctgatgactgttacaacaataagcaatgggaagaacctagttgggattgatacacacatgaaggctcttaacaaaaaactggatttgaattccaacaaaagtttgagagtggttgggatttgggcaagaggatacaatggtagatcagctttagctaaatatgtttatcaagacatctgtcaccactttgacagccattgtttcttgggaagcgtgaaaaggatttctcagggtcgtcacttatcgcatctacacgaagagtttctgataaggattcaaggaagtaaacataatctcaaggaccaaaaggttttgcttgtggctgatgatgtttataagcttgaacagttagatgctcttgctgaggatttcaacgggtttggtccgggaagtgttgttatcatcactacacaagacaagcatctgtttgtttctgctggtataaagcttgtctacgaagttgagcttttgaaattccagaaagtttgtgaactcttccgacaattcgcctttaaaaagagagacatttctgctgcggtcaagttggtttactatagggcaacaaattggttaggttgtctaagtggtagatctggttaggggggaagtgttaagaatcaattttgaagctaaatctcttttcataggcaaatagacattaagttaagggaatgtggctttgattaagtttgaagcctctccaaataaccttccggttctcgtttgggataccatcctatccttttattactttgttttcctttccactcgtgtaaaagcgagttccttggcaaagagttccgtttgcttaattgtgattttgtatctttggtttaattaatcttaaaggaaattgtgaaaaaaagaagttaatttggttttgaaatatgaatgtttttgttttttttttggagtattttgtttgtaattttgaatagactaactaatacaatatacaatttttcttttaaagttttgggtttgatgtttccatatgcacaacaaacttatacctaactaaagttcatagctcaaagttggaatctaaaatgactaacaacaagataaaacagagaaagggaagcttttgaagaggaagatcccaaaaacgtgaaagctgtcttcttctgctttctctcactgacactgtagaatttttctgtctgagaaagacaaaagaatgggtacaatttctctatctgtctgccagtatccttcgtccgatttatgctttttgataccttgtttgcttctttctcaggcttttacgtctcatggacccgttttcatgactttttttatgggaacaacaaagtgggctaaagcctatagatggtaactgaaattaaacaaagaaaaacaaaacaatcagaaaaggcccagcccaaatagggagaaggaggcccaaacagaaaagaaaaacggagcacaaaatggttttaccggcggcaagaaaaccggcaaagtctctcggccggaagcctaatctaaaatattgcactgcattgtgtcatttcattgagttgactttgatattttcttggttacaagctgacaaaaataacaaataagaaaatgcgaggaaatttaacctgtctctgaagcatgaagaaggagtctctgtaaaatcctcccacacggttacacgtccacggctattaatcccacttattccatttctctttagaatcaatgaaatgtcagattcttcaaacaccctcccaaagtttgatgtttttctgagcttcagaggactcgacactcgccgcagcttcatcagtttcctctacaaagaactgattcgaagaaacattcgaacctttaaagacgataaggagttgaagaatggccggaggattacgccggagctaatacgcgccattgaagggtcgagattcgcagtcgttgtggtctccgtgaattacgctgcgtctcgttggtgtctcgaagagctcgtgaagattatggatttcgaaaacatgggctcgctcaaggtcatgcctatcttctacggcgtggatccgtgtcatgtgaggagacagatcggagaagtcgctgaacagtttaagaagcatgagggtagagaagatcatgagaaagtgctttcatggaggcaagcgttgactaatttggcgagtatctccggcgattgttcatggaaatggtaaaaatttcctaactttgataataaaggtcgaatttttattgttaatttgagtgaatggattgtaaagtttcgatttttactttgcagggaagatgactcgaagatggtcgaagaaattactgacaggatatcaaaagagctgatgattgatacaacaagaagcaatgggagtgaccttgaagggattgatgcacacatgaaagctcttcaccgtttattgaatttaaattctaagaaaagtgtgagagtgattgggatttgggcaagaggaggcaatggtagatcagctttagctaaatttgtttatcagaacatctgtcaacacttcgaaagccattgtttcttggaaagtgtgaaaaggatttctcaggatcgccacctgtctcacttacacgaagagtttatgatacggattcaaggagaatgcttgagtaaattaaggctcaagaaccaaaaggttctgctcgtggctgatgatgtgaataagcttgaacagttagatgctcttgcagaggactttaactgctttggtcctgggagtatagttattatcactacacaagacaggcagctgcttatctctgctggcataaaacttgtttatgaagtagagcttctcagattccagaaagttcgtggactcttcagacaattagccttcaaagagaaagacatttctgctgcgttcgaggtgtctttgtatagggcaacgaatgttgccatggaatggttaggttgtatatgtggtagatcaggttaggggaaagtgttagtgttagaatcactttataaagctgatcccttttttcatgtacattaagttaagaatgactaaacttagtaagatgtgattgtggcttagaagtaggaatgttttgtctatttttggagtgtgttgctggtgtatagaagaatattattctttgattggattaaatgatatacaaattctatttcaagtttgtgttttgatatttccatgtgcccaacaaatttgtagaggagatctaaatttcctaacttgcattccttgcttttgccttttccaaggaaaaagaataataactcaaagttggaacctaaaatgactgacatggaaaaacagagaaagggaagcttttgaagagtgagatcctaaaagcgtgaaagctctgatcttctttttctcactttcactttgagaattttctgtctgagaaagacaaagaatgggtactattttctctccctgtgtggctttttccttttatcagatttatggcatttgattgattcctgatagttggttggttctttgttgtttcgctagcaatgtagatccatatatacgagtacctttttctctgctttcttcagaaagaatgtcattgttattggtttcagaaagtaatgcctctgcatgcgtaaacaatactaagaccaagtcgtttctctcgtttcatttcaaaattgtttgctttggttgttgaataaaatatctcaattaggagacagtgattgtgtttaaagggcttctgtgacgagctacataatccatattagatgcagataaaagcgagggatgttgttctgtacagctcatcgacggagatggtatatacaatgtctctcgcatcgatcatttcattaaagatgtgaaacttgcagactgtggcctttcttatgctgttgtctctattatgggtcctcaaagtagcggtatgcattcctttagagaagatggacttttgtaataatcagaatttgtttgaatgtagttagttcatttacagaaatgttttgtgatttgacagggaaaagtacactattgaaccatttgtttggaacaaactttatggagatggatgcattcaagggaaggtatgatttcatctgatagtatttgcttttaacttccgtgtaaaagtttgttgcctgattaggaactcgtctataggtctcagaccacaaaaggtatctggcttgcaagatgtgccggtatagagccttgcacccttgtaatggatttagagggcaccgatggcagagagcgaggagaggtaatttttgtctcgctgttttggtttagtgtgtggcattgatcactttcttttacataaattttctataaatggtgtcctcttttggccaagcaggatgatacggcattcgaaaaacagagtgctcttttcgctcttgctatctctgatatcgtcttgatcaacatgtaagattgtagtggaaacatcaaaatatgcagctttcggttttggtgaaaggaaagtgtttcgttacaaattctcaatgcttgtgcttttaggtggtgtcacgacattggccgtgaacaagctgctaataaacctctcttgaaaactgtctttcaggtattttttttgatgctcaggaagttaaaaactctttgtgtatcacaaaaatattttcttaccctaagtttgaatctttggagttgggtttggcaggtgatgatgcgattgtttagtccacgtaaaacaacaatgctgtttgtaatacgagataaaacccgggtacactctcttcttttttctttgtatcattcttcttacattgcagatttgtaacagctaactggtacatacattgtctattgatgattttggctgcagacaccgttggaaaatttagagcctgtcttaagagaagatattcagaaggtaaaagaggagtgagtgactttcagctaattccaagttgataagctgatcaccgttttgttttgttcttcattgtggcagatatgggattctgttccaaagcctgaagcacacaaggaaactcctctaagtgactttttcaatgtatgttatgttacagctaggcttattagcaagaaggatttccaaatttcaggaatgtcatggctgtttctttctttgatggttaggttgaagttgttgctctttccagttatgaggagaaggaagaacagtttaaagagcaggtgtgtgtatgtgagaggccaggatttttgcagatgtctgatacttatgttgtgtatctcaaatttcatctatttcatgactgattcgattttgttttgtaacttagattgctagtttgagacaacggttcatgcattctattgcaccgggaggtcttgctggagacagaagaggagtgattccagcctcaggttttgcatttagtgcagatcagatctggagagtcatcaaagagaataaggatcttgaccttccagcccacaaggtatcttatagtgctagctttttaacattctttaaactccttctaagctcattctgcttgcaggtcatggtggctactgtgcggtgcgaagaaattgcaaatgagaagtttgcgcatttcattacaaacgaggtaatgttaacgttctgcatatcttaaactttcactcttcttcattgtttgaaagctgtctttgtaagtcccataatcactaactaaccttgttgcttcatttacaggactggcgcaaactggatgaggaggtgcaagccggtccagtttctaattttggaaagaggcttactaccattctcggttcttgcttatcagagtaagcacacttacatttaatcaagctacacacaccacacactgtagttgaattcgaaagtaatgtcaagttcagtaatatcattaagatttttttttcttagatcttccttgtggatttgatcttcacagttcctctattttattagatatgacggggaggctacattcttcgatgaaggtgtcagatcttcgaagagacagcagcttgaagaaaagcttctccaagtaatatataataagatcttttaatcatgttgttaaaattatatgcagacgtgtcaatgaagtaaatgaatggagattgatactatgccttccttactataatattaccttacagcttgtgaatccagcgtttcaagatgtattgggacatataagatggggaatacttgaaaagtttaaggcttcttttgataaggctttaggcattggtgaagggttttcttcagcttcccaagattggttcaaggcttgcatgacccaattcgatgaagagtgtgcaggtgccatcattgaacaagccaattgggacacatcaaaagtacgggacaagctagtacgtgacattgaggctcacatttcctctgtgcggacttccaagttatctgaacttaccagtctatacgaggtaacagaaagaataaagaaagcttgcgaaattgagcttagttactgatttttagcctctaatttgcagtcaaaagttcatgaagctttatcagaaccggtggaagctttgttggatggagccaacgatgaaacgtggagcacagtaaagaagcttcatcggcgtgaaactgaatctgcagtatctggactcagtagtgcattagctggttttgacatggaagaagaaacaagagatagaatggtgaagagccttcaggattatgcaagaggtgtcattgaaacgaaggcaaaagaagaggctgtgcgggttttgatgcgtatgaaggaaaggtatagcaaggcttcttaatgtgcccagtgatctttcaaaaccagtttcaaacaaccatttaatcttgaatctggttgtaattttttttcaggtttggtacaatcttcagccatgattctgattcaatgccacgtgtttggaccggaaaagaggatcttcgagcaattactaaatcagctcgatctgctgtacgattgttattcctctttacattttgtttagtaggcttgagaagtccaaacaccttcttatggttttttgttttcagtccttgaagttgctctcagtaatggctgtcattcgattgggggatgaacctgataacatcgagaagacactaactgtagctctgctggatccaacaaagaatgatacttctaagaaaagcatcacaacatctgatccactggcttcaagcacttgggatgaggtgtgtataactctgctgcgatgtgtttcaacttcagttgattctcgatcttaacagatatgaactcattacttttataggttccatcatcaagaactttgatcacaccggtgcaatgtaaatctatatggagacagttcaagacagaaacagagtatacagtgactcaagccatatccgcacaggcatgattactttcctcataagttagctcttcactctgcttatatgaatacttatataaagtgtttatactaattcaggaggcgaacaggcgtggaaataactggttacctcctccatgggcaattcttgcattgatcgtccttggattcaacgaattcatgactcttttaaggtccatcaaagcttagtattcactgcttcatatccaatgatgatatgtaacattctgatttctttacctttttgatgtaacagaaaccctctctatcttggtgtcatgtttgtcgctttccttctggcaaaagcactgtggacgcaattggatatccctggcgaattccgcaatggtgcagtaagtgtttgccaaccttctcaaatcccattaaagtagtagtagcgtttcaagaatcatggactcgagaaaacttcaagactcaagaattcttgataataatactcatatgatctatactacctgtggtttcttcagcttccagggctcatatcgatatccgcaaagtttgttcccacagtaatgaaccttatcaagaaccttgcagcgcaaggcgaagaccctcctgcagctaatccagagaaccgtcgttcgagcaacaacacttcttcatcagaaaatccaccagatcacaaaagctcctcaaaagaggactaaagaggagagaaacaaagaatcttcttactctccaaaggtttgatctccagttcttgacgtttttttctccttattccctcactcatgagtccaaaacgctgcgtttatagggaccttttgctctgttttattagaacttctcattatacacacgagtgaattagaacttgaaaacgttgtggcatcatttgaatatttttccttcaaataaacaaaaaaaaaaagatgaagatgaaaaccaataataaatatatgtacgttctataataactcgtttcatgaaagtggaagcatgggatgagatgccaatcccatgaaaagtgagcaaaaattaatatttacattaactgctgagtgggtaaagtttaataaccattttctaaaaataacttttattcagaatccaactcatggattggtgtgtgtatttattatcatcatttctatacacatatccacccccaataactctgtcaattatacacctcaaaatcactgtaagttataaaaaaatgaatttctacaattaatcaaagaccgtccaaagccttcgtggctaattggtgttaaactattcacatttttagtcaagtatttttgcatattatatgagattaattttgccacacaagatcgttaataaactcgacatgatgattctgtttatgtggcttctattaactaggaaatgaaacaatgtagttatagttgtgactgatatgaagtcagagaaaatggctacgtaatcttatatgaccagaccaacgtacgtgatgcgatgtgacatttttcattcaacactaaagttaaaaccttgattgtttttgtattacatttggcaactaatccaatatgttttgttagttgttagtactaagtactgactgatgatcacattcacgctcaaccaaataaaacggatgatattgtttttggttaggtgaaagaacaattaaattagttgccaaaaacataacccgtgaagatttatgttagtaaccaacctacagtcataattaataagtttatgactaatagtaattaaatgacttgccaaaaacatggctctgtatagtatagtttttagattttggttaggtgaagatgattaattgatacactatgaatctatgaagacttgatccaacggctaccagatctccgacttcaactgttttcatatcgccattaatgatacagacaagctgtactactatcctttttatctctttattgttttatatgattttacagtaatactattactaagtactaacaaattgtttttctttgcagctggtcccaaaagtcaaaatcatgggacaaaaaaacgagttattattcttattatcatcaccaaggtaaaaaaatgtgaaaggaaatccttttaaggcttagtttcaatataaatacaaagatgttatttgatagtgattgttctttgtaacgaagtacttatcattaatttcaatttgcaacaaacaattctgtaacaataagtctaatgtgaggaaagttactagctggtaaaataaattagtaggtaactattttttatgagtaaatgagggaactattaattgagtaagatgattcatatgtccttttcatttgctatattcgacagaatgggacacacctaaaatcaaatttacgttttagtgtagaccaccccaacatctctttattacacaacttgtgtttttttttactatatgatttttttaccgaatgttgttgtctaaccaaaattcaatgtaccgtataagactataagttatacaactcgtagaaatggttacatatatgtaacaatatatagagacacatgtgggtgtaattaatatagttgctctgttggatcgttagtgttatttataggagaagaaaacacacaaaacaagaccattcatcaaaagccacataagaagttgatgcagaagcaataataacaaaacaaaaaaacattaaaaaaaaaagctcttcagttttggtttctgcagtctccaatggctctcaagctctttctctttgctcttcttctctgtctcccgacttctctctcctccactgcctctaaaggtcacttctctttctctctttaaacacaatcctcccattacaaagttctctctgtttttatctttctcttggtcgttgatgattctgtcttgtttttagctatagctctgtttttcgaaactagttacttattcatagacatgatatacattcataagcttcttttttatatattaaagactctgtttcttgatccatcatgaccgaatcttgagtaaccaggacactagtgcacagtccagtctttttttaacgcgtaaactgttgtgtgttttttgggttatgttctgctataaacacattaatggtgtaattacttctaccaactacccataattgttttatttattgaatagtacaactaaaaaaaacaatgattttgtaggtaaagagaagaagtcgaagtttaatccatacagatacacattcatcgataaagcaagcacattctcatcatcttcctcatcttcattttcatccaacggtcaagattcgtcctacgactacatagtcatcggaggtggaaccgcagggtgtcctctcgccgcaacgttgtcgcagaatttcagcgttcttgttttagagagaggtggcgttccgtttacaaacgcaaacgtttctttcctcaggaattttcacatcggacttgctgacatttcagcttcttccgcgtctcaagcgtttgtttccactgacggcgtttacaacgcccgtgctagagttctcggtggcggttcctgtattaacgccggtttttactccagagccgatgctgcgtaagtataatttttacctttttaagacaagaaaattatgttgtttattatatactactaaaaggatttattggtataatcgatgcctcgtgtcctagtggatatgttacatttatgaaaacgcaccgagcgagaatgttgtgttttcttaataattttgggggcaatggtccgtaagacttttaattctctttaatttttcacactaatcaacacaatatttttaacaaatacttttcttcagtaaaaattgcaaccattttttttttcttttcgaaaaattgatttcttatataatattaaaaaaattctcgaaaaaactgatttactgtcataaaaactattttttttgttcagtaaaataaggtaagaacaaataaatgatttaaattgtgacaaaacattcaggttcgtgaagcgagcaggatgggatccgaagctggtgaaggagtcgtatccatgggtggagagagagattgttcatcagccaaagttaacgttatggcagaaagctctcagagacagtcttttagaggttggagtcagacctttcaatggtttcacttacgatcacgtttccggaaccaaaatcggcggtacaattttcgacagattcggccgtcgtcacaccgcggcggagcttctcgcttacgctaatcctcagaagcttagagtcttgatctacgccaccgtgcaaaaaatcgtctttgacacttctggtactgataaatttttgtgtctaccaaatgttcgatgaaattcctgagtgaggaggtttttaacttttgttttggttttggatgtaggaacaaggcctcgagtaacaggagtaatattcaaagatgagaaaggtaatcaacaccaggctttactctcgaatagaaagggaagtgaagtgatcttatctagtggagctattgggtcaccacagatgctgatgttaagtgggattggacctaagaaggagcttcagaggctgaagattcctgtggttttagagaatgagcatgtaggaaaaggaatggctgataatcccatgaacacgatcttggtgccttcaaaggcgcctatagagcagtcacttattcagactgttggaattacaaagatgggtgtgtatgttgaagccagtactggctttgggcaatctcctgagagtattcatactcactatgggattatgtcgaacaaggtaacgtaactttgttgttggtgtctttgtaggagaatgttgtttgatgttaaggagataatggtcttttgattttgtatgcagaatgaattgttttccaccattcctgcaaagcagagaagaccagaagcaacgcaagcttacatcacaagaaacaaataccaacttcacgaagcattcaatggaagtttcatcttggagaaacttgcttacccgatctctagagggcatttgagcttggtcaacacaaatgttgatgacaacccttcagtcaccttcaattactttaaacacccggtggatctccaacgctgtgttgaagccattcgtcttgtttccaaagtggtgacgtctaaccgtttcttaaactacacgcagtgtgacaagcaaaacgtacacaagatgcttagcttaagcgtcaaggcaaacatcaatctaaggccaaagcaactgaacgataccaaatcaatggctcagttctgcaaagacactgttgtcacaatctggcactaccatggtggatgtcttgtgggtaaagttgtgagccctaaccgcaaagttcttggtgtcgacaggctcagagttattgatggttcaacgtttgacgagtctccaggaaccaacccgcaagctactatgatgatgatgggaaggtaaatcaaaatcattaccaacataatgaattggaggttttctttttagttcaatatataaacagaggatttgtcaatctttgcagatacatgggagtcaagattcttcgggagagacttggaaacaaagctggtgtttagtttgcagattgagcttttatggtagacaaattcgtagcagataattctgttgtggaattgtgttggagaatatctctctctgtctccttctctgttatttgatattcgattcattaaagtataggatcatattgtctaatgaactgtgtaaccctctattgggcaatcggctctgttgcttattagcttgtgtgaaaagttaatcacgttttctgtttcaatactcttacaatcaattcatggcctgattttgctttcagattcactctgacaatttctcaagctaaaacagattcataaacacatgttcttgttctagtaataaaagaaaaaacatttgtaaacaagataactagttctaaaattctaaaggaaaatacaagaaatatggtaaattaaatgaccattcactatagcaaagatgagaagaaaaagcgtgataatgacgaagctgaactagggttttccgtgttcaaacttcatacaacacatgagactaaaaacctgaaaggaactacttttatatgattgccgacgacatgagtatctgcctcatgagattgttttttctctggtcagagattttttcctcctcaagctttactttgctggtttgttcaggcatctccaaaaacatatcgtagtttgacggattctgttgctgctgctgcatctcttgttgttgttgcatgttctgatgatctaaaccatccacattaacgtattcatctccgtcttgttgtaatagactttcgaaggaattgcagcgatatggaagattttgcctttgcctatgctgctcctgagctagagagcgacacatatcgatttgctgacgagttaagttaagctcagtctgaacaaactcgatcttgcacttaagatcacagattgtcctgtaaacccctcctactggatctagggcacgagcattagcgtggtagataagattctccatagcgatgtctcgttgagattcttcgattctcttgagcatcttggtgatgttgcttactccaaacagtttatgagcgtttagaaacttatttgtgccatcttgtgggaaataacgagcgagaatacagtttttcttacacttttttctttggtgtttgcaggcagcgcaagctgtggtggaaccaccggagaaagtgcttaaggacattaggtttatgttttgggatatatggaagttttaggatttggcagagtttccttgtttttctccttaagagaaggtgcaagaagatcgtggagagagttcttccgagttgtgggtagagaaattttcagcaatggtatcttaagagaaattttggtagttaaatagagtactaacaatagcccttttctgattttcacaaatatatatctgtttgcaattatatttttatcagattttagttgattttttctaatttttagatgtatctagtttttattttatttgtagataaacatctaatatttgtaggattatctgataattcattaatgtttttatattttagtggcgtgtataaggttttttgtgtggatagaattgcttaaacaacaacagtaaaatagatttttggatttacggacttggaaatgttttttcgaccataaaatctttttttatcgggtctgactttttaatgtatagtttcatgtttttggacacacaaaaatcttttggttaactttaaattctttatcatccaacatatgatttatagcgggctgattgttcacgactggaacttttggttgtatccgtgaactgaaaatctacaactgattaactttggaaacatttgaaccgcatgtgaagtcttggtgatccactgcctccagcgaaagctcgagatgcggagattccaactcgaataccacctgcaaaagaattcaacaaatctaagtaatggattacatggaatgagaatgtatagagattttccattcctctgtcctaactaacaaaaaggttaaatctcatgttcatgttgacataccaaagtgtttttgccacgcttaagaagtggcgcaggaacatagaggttgcactgtggtccaacagactgcaaaaagtatcatgtgtaagagaaactgtacattggggatgagctttatagaggaggagaggacagagttataccggccaatatcttccaatgttgaattcattgacaaaagcaactcctttaccccaaccgttgaatgatagatatgtgtctttgatttcttcttcactgttgatagagaattcaccagcaaacagagcgggttcctttcgaccaacatctacagttatcggtgtaagaagcaattagtttcattcatgtccctactagtagtagtagatactgaacacagcagaaaagcatctttagcgattgtagtagccatgaaattcaaatcaccaacattcttaacttaatcaagggcatgctgaaaaagttaagaccactgaccattagtaagctcgaactttttacttctgtttttggtatgttgcatctcgaaagtgagatttggctcttgatttagattgtgaaaaggaattggtatcatcttccatccatggagaatttgaccatctagataaaccgaagacaaaataccctgaacaataatacaatatagacctttttaacgagctaccgtggattccgaaatcttgaaactgtcttcaaactgtaaatatcacattcactttgtatagataactaactttgaagaactgtcgagagtagatgtataagataaagtgatctagacaattttatcacatgcctgcgaataataaatgtctgtaacataagtcttaccttgtcatcaaagatatatggcccataatttacacgacccatgttttcaacctataagaaacatgagcaaggtaatgacccaagtaagaatttgcttaaccaaaattttatataactgatgattctagagctccatagagaggtaaagaatcttatctgaggatccaaggattctcttaccagaataaataagctagtgtttgtggtacactcaatagttggaagagaaataggttggttgttccatctctcagtagtaccaatgtatctcagtactcccacatcaacatcttgggaaagacatgaaacaaacacttgagctctgtcatgaacctgcaactcatcacgttagaagatgacccttatacatattgccattggattcagacaaaaaggttcataccttgggtattcttagtgtattcccactcttttttgcgatgtatgaagattcatataaaagaaatccgaacatctgggagcaagacaataaattatcagtttatacaaaacaaaggacaataataatagaccattccatggtgagtagggagatgcttacgctgcaccgtcaagaataaggaataaagacaattgacattacatacctgtccaacagattccattgaaattgggttggcggaggtgatcacatctgcaggatctgtcatacgaactaaatcaaacagtgatgttgtcatctgcatcttgatagagccataagctttccgttgcttattggatgggctaatggggtgtggtgaagcattgtacttcttaatcactctctgaagagctgacaatagcacaaaggttaataaaggaaacaagactgcaaaatcgctaaaagcaatcataagatcagaccttggaattttggattatctatgtcaccagactccttaatgggagcatcctgaaatgacaaacaaaaacaatattactttggaatatagttaaggatttacaatagcaggtaatgatgtgaaattgccctacatagtcataagatgtcagatctggtttatagtcagattcttcagagccagtatttgcgccattgtagaaaccaaagtttgttcctccatgcaccatctgaacatcacattacacaatcctcaattatcattaatccctatctggtttaacactgatatgtgagaagttttaagcacatacatagagcacagcagaaccatttcgagacagaattttttcaagagaagctgccgtaaattcggcatctgtttttgtaattttctcaccccaatgcgtgagccaaccagtgtagaactccctgtaacaaacagctcaaaggatctagatggaaaaaaataaaataaaatcagtgtaaggttaggcgcacaagagacttacgaggaaagtggaggtgatcttcctggagcattaaacttcttttgcaatttaaatattggccaaggatcatcaccggtagagaaatcaacagctatcaagagaaagaacttgctagtcattgttatatcacaatgttagaaacagaccattatttcagtttactatgaatcatggatgcagagtaaacatatactttacctgagtagacatcagctacagggacagttcctttatcaagagtttcttttgtccctccatctgttgtgtacctgaagatcattatcagcaacaccaaaaattctcaactgatcaaagaaactgctagttatcaactgattcaacacaatctcttttcacaggacaatggtttcaaggtgcataacaaaacactactagataataccactgaaaaacgagagcctagcatgagatgtaattcttaacatatattcaataacatctataaaaattcacccgaaacatgccaaaacagaaagtaaaaaggagcatagttcactggagagttatagaaactgaagaaagtagaaggcagaatgtaagtcttacacaataatgtcatcccccaggtgtcccctagccatactaactagcttacgaagataagctttgtcatttccatatgaaccatattcattttcaatctgcaaaaattagcctacataaaataaacaaacatgctcatataaaagatctgtgacagggattcacattagtcaaccatagtgttccaggtctacgaaatttatacacaaagatatcttatttaaaaatcctttcagaagatcaactcagtaatgaagccgacacatcttattaactgcagtcatcaagcaaacactagagtaccagatcaggataaaagatatagtggaacatggcttttgatcacgtacctgaaccattataacaggacccccgttgctgtaaagcagaggaaataccttcggtaacagaacatcccaccatctttcaacctgtaatatgttttgtcatgaaaaactctactttgaacataatgcataagaaaagtctacacaaatggcgcctttttcttgctagtttgcataagaacagcctttctcttttcacaattatgcaaaagtaatcataatttctacccattctccacagaccattacattttgcttcttaattttcacaaagatacttgagaactcaggcctgtagcatcatggtgattctaaacgacaacttaaagaggcaaacatggaactatgaatgtgtatatatcttagattaataatgcacactgcaagctgattaactgcaactccaactatctatctactacttacttcatttaactgataacttaccaacttaagatatacaggatctgatgtccttagttggagacgtggtttcacagcaagtaaccaagcaggaaagcctcccaaatcccattctgtcatggagatgggaacatgtatcagaactttttccgttgtataagcaaatcttccacataatgtggtaaaaaacattggtatcaactcaataagaatcacaacaacacagacctccacagatataaggtccagcacgtagcataaccagaaaatctagtttctcacacagcttgagaaaggagacaagatcaccaataccctcaaaaaccatcttcccaggctttggttcatgcagattccaaggaacgtatacttgaatagtattcaagcctaaagcattggctcttaaaagccgatcctcccagtactgcatccataatctggcattaattcatcaaatcatatatattataaacataacataatgatggttaacagcagaaaatattgaagatttcttacttagcaatcatatggattacttgttataaagacacatgtacctctggaagaacacgaaagtaatgcaaatcaccaccaatgatctgaaaacgattcccatctttccagaaattgtcatccttgatataaaacttgcgagatatcatctgcatctcttaaaactgaaagtttagaacgtttacattgatttcggttccaactaaaacgaagcaattagtagaaagcactgaagtatgaatcatgcttaccttctcgtcctgaggtatagcagaaggtagagactgaggagtatatgacagtgaagggagaagagcgaagacaggaacatagattccgacaactacaagaaccaggagcaacatggaagccaattgatgtcttctttgtcttcccgttgatggccagcttgtcatcgccatcgtccctcttctgcaatagtacgcttggccaaattgcgcactttttagccggttttagcaaaattcaactcctaaaccgggagacatcggttccggtgaactaatgccgggtttgcatactgtatcatagaaacctgacggatacaatcaccacatcagagacagactgcaacaagaagaagttgaagtataccaatcaatttcctaacttgatgttccttaacaagcccagatttgaaaaggacaagctaccaaaaactatcaaattggtttaagaagctatcgctatcgtaccggcaaattcaagcccccatggccggaaaagtaaacggctcggatttgacgacaacatcactacttcgttatcacgtgcacatcacgtgttgattagagtatggactaaagtcaacaaaataaaatttacatattgtgtgtagtgtattggacatgggctcaactcaaagttacactaatcttgatttgttttttctttgtaatacacgcaacttgcatacaaaccaatgcccatacgaaagtctaaatcagaaacaactcttcttccaccatatacacccttaataggggcgttgatctttcttctacgtcttgcatatcatattcaatttaacaaatttagtttagattccattttgatgcttcattttcgtattgtttatccaaaaagttgatctataggtagcttctgaaggatccaatgagtcatacaataatgagatttgatgtcacgttcacacttgtacacccaattttctaaaaagccaaatgacaaaggcattttcgtgcagcccaactccaaatattagtcataacacattatatatctatatatatacgtatgtcaagagaattagtcctagtttcgtacacaattttcttctcaaaattaaagtacacccaaaaccatgaatcttgctccaatccatgatccatcatcatcatcaacaacaacaacatcatcgtcaacaccatacggattaacaaaggacgagttctcaacactagactccatcatccgaacacaccacacgttcccaagatcgccaaacacgtgcacatcactcatagcacaccgtgtagacgcaccggcacatgccatatggagattcgtccgcgacttcgccaatccaaacaaatacaaacacttcatcaagagttgcaccatcagagttaacggtaacggcatcaaagagattaaagttgggactataagggaagttagcgtggtctctggtcttccagcgtcaacaagcgttgagatactcgaagttcttgacgaagagaaacgaatcttgagttttcgtgttcttggaggagaacaccggttaaataattaccggtcggttacatcggtcaacgagttcgtcgtcttggaaaaggataagaagaagagagtgtatagtgtggtattggagtcttacattgttgatataccacaaggtaacacggaagaagatacaaggatgtttgtggatacggtcgttaagtcgaatctacagaatctcgccgtcatttccacggcttctccgacctgaaagtgtttgtgttgaaaatgtcatgtgtggtgtatataatgggccataaatgggccgattatttgttcaacggatgtgtttgtgtggaatgtgaggtgtgtatataaaactatgggctataatgggcttagtaattattatataaggaaatccctgaaatgatccgacccaactatatatatttgtttgctttcggcagctatcccaaatttatatactatcggcactgaagttaattgattattactcttttctctatactttcacgtttcatgaaaaatttcatgcttggatttttcttaattttgaaaattagaagtcacttaagttagatggaagtgttattgatatttacagtatgagttcaattatatgtaaagtaaaagtaaacattcgaatataaaataatctatgtatatctagttaaattatatatagatcagtagaaaaatgctggctgtcaaaaataaaagtcagtccaatttttttgatagaaacttggtgcatcatctttcagcatttgttacaaaatttcttgaaaccatgaagaaaacgaatacacgtatcgtcattgcaacaccatgaagaatattcgtgtcagatgattcgaaatacgaatctgtctgtatttggatatttgggaccgcatggctcacgtggcttctataaatttggatttggaacatcaagaaaaccaattgttaattgcgatttatgaacttataaattatgatagatttgttaactactttctagggtgacaaaacacacgtgaaaaatgaatgacaaaacagcgtaatattagacgaggttcattcttcaagaaattatataattatcaaacaaaactccataattcttctttttcttcgaattatcaaccaatgaagaactaataaaaacaaagatcgcaatcttcttgcaatttcatcgtcatacaatattaatttaggataaattcaatctttttggaatcgtacgtactacaaattatgcatatatgaggaagaagaaacaccacagttgtaaatcttcttcctccactatttcaaaaacgtctaactagactgagacacacgaagagcacgaggcaatattggttcatgatgaacattattaatcccgatagagatggtctgcatcttgcaattattctccgcactagtcaacatcttctccttctcttcctccaatctaatctcctcgatcgttcctatcaatatcatctccatgctttggccatcggtccattctctaatcgctgctttaatcagcattggattttgactaattagatcccatacagggaaattcttacgtggcatcacgtaatcttcagtgtttagtttcaaacttggacagtaatcgccagctccatctcctagatagatcattttcttcttcccttctttagctaaagattgttgaatcctctcaatgatcaaaccctaaataaatgtaaaaatatggtttaatattagaagatagaaaggaccaaagtaggacaatagagatgtcatgttttgactgatttgttatagaccaaaactaattttataccaatgtttcccaaacatttgtcaaaatacttattgataacgctaattaaaagagatcatataattaaatgtaaaagtaccttgcacatgttaggagggcaagtgccacaagagcagctatgaggggatttagtgaagtcgtggtagggagagattttcaatgtgccacgttcatcgacatatcctgggttcgagttgatctcagagaagagttcgctaattccgagatgttcaacgatggtctcgatgaaaaacatgtttgcatcgctcactatcctaagctcacacctgaaaccgaacccgtaaatatcggatcagaaatggtgggttttgtctaacattagacatattttaatagaaaaaaaatattgttagacatgtaaaatttgatagttacaaacaaaaactagaaagaataataatgaagattattaccctaaatcatgtgcagatttgatggcagggacgacacgtggatgaattgggattgttctcaagacttgtttgatctcctcaatggttttgccttgatcatgaagctccttcatcatacggtcctgttattttatacaattccatttagggttttattcgataacaaaattgcaagataacaaaagcttttataaaggattgaaattgcaagataataatcgaatacaaaaccgaaaagttattcgaaatttcaaaaggaaaatgagaaaacagatgagagaagaaggtagaacaaaccatgagtgtgttccaaggcatggtggggagaagttgattgaacaaatcagtgaagccaagttcatcgattacccaattatcgctatcaacgtcgatgatggtcttgtcgaagtcgaaaacaacgacaatgttgttgttgttgttattgctattgctattgtaagccatgactcaggaaatttctaaagaaattagtgattctaattgatggatctctctttgagttcttgttggtttgtgaattgaggagaatagaaatgtggttaggtatttatactaatgaatggagagaaacaatgggggattttatcggagatgccaatggaatattaccttcaaggtaacaaaaaaaagaagaacaaattagaatacttttgattttattctgagaaccgttggatttgatgacgtttacgggtcaaacttgagtcttgtagagagatccaacggttgtgagggctctggggtgatttcttgcctttttagaagtttcctggtgggtttaataaaaaagatgaggaggaggtaacgcgggaataagagaagaatattccgttacccaaatatatccttacttcaaataaataaatatcaaagaaaataactaaaaagcagtactatatcagataaaaatttgatctacgatttaaaagagaatggaattttagataattcaaaccaatatagttatagttttagtaatatatattctagaaacttttttaaaattgattgttattgtatatatacatagtttttgttggttttcttttaaaatcttaacattgtagttaattctttggcaaaaatgaactcttataacattatgctattttgagatttctttattttatgtgatatgattattggaacttgataggaaggcacttgcaaggaatcgtgagggacagagattaacaataataagaagaatatcctaattaagtagcagcctttttcggtggctacaggctttcattgtttactttcatccatttgatttcaacactcatttttccaattaattgtactataagaaaaccagaagatcatattttaccaaaaaaaactgacagacggtccacggtttaagactgaattatatatatttagctctaaaaatttgactaatttcatttacacaaattttgattaagagcaaaaagcttttgtaacgtatttgaatacttaatgagcacttcgaatagctatggtgagttaagaaaaaaacaattaatgtaaaataagaaaaacaaataggtgcgtgtcaataatcaacaaatgttgtagagaaaaacagttgtcaataaatagataaagttggatccgtgacactagagcaatggcaaaaccataagctgccaccaaataaagatctataagaaacacgttgccttgtaatcataataacaatagtatgtgatatacatgacgcgtcagctttcgaaacttagcaaacgtgatattcgcatttgctttgaacattgataaccatgcatttttatttattgagcaaacattcccttctatttcgtcatatattattcacgttaaatcaagtgttgtgttatgaccaaattacaagctattttcgtaaactgtttagaattatgagttttatggaagggtctcatgtctagccacacttttttttttttccatactttcttctcacgtatcatatgatgattcatcgatttctgaaagttaaatgttattccaaacactacaacatgttttacaaattatagtttgacacatacacttattcggtagcctaacaacactgacatgatccgagaatcgtcattagaatataagctcgtgatattccttgtgtccgttgattatattagcacaaaaaatgaagaatccaaagtttgatagaaattctcattttagtacacgattattttatatgcggttcgtatgcaaaagcgacactcgctgatttgtgattgtgaaacagttttaaaaagtaaattcgtccttttctatttgtgacatgccacgccatctatgtcccattaaaatcctaatcgcacttactaaagctgcatgccaagttcccaagtatcgtgcggtccaatattcttcatttttttttttttttgtcgaaaacgatccaatattctaggatctaataataattgggaattaatactgtaatagttaaacatctaacgtatacgacattttgaagtgtgtgcttagcaaatctgaaatcacgcgaatttctattaagtatatcacgcgtaaacatacatatatttgaaatttgaactgtattaatatacttaagtttatatcattacgacaacattagaagttaaattagtaattcgatcggtttaggatggataacaacgtagaacaataataaacactaatcacattcatatatttatatgtattgaaaattgtgtactcgtatacatagaaggatctagaagatattgaagatatggtaaatatatgttattgatattatagagatttgtattcatctagattatgaaacactataaatatgtaattaaccttaacatgtattctagatctttctatagtatatactttctctaaaggaaattctaaatgatctttctattatacacctttgagtgactgcatgcataggccacgacgctgtgtctttaatacatgacgcggcgaaaatcaactaaatcaatcgtcgtctatgaaatgttattgcaccattttattttgctgctccaattttctctattttatttttttcaaaaaccttttgatgatttacgtctcttttatgttttttccctgttgcttactgtctccactaatttgacttttagaaaataaattattagttttgccaaaaaaaaattaactggtggtgtttctaaatattattgtgctgattcttttcagtatcatataatcctaaagatctaatggatattaaaatttagtaagtggttattttcctacactttttaaaattatcccttctaaatttaaaagtttatattgttttttaaattgtgatggtaattttgaaaaacaaaacatacaacgtgcatgacattattgagaaatgctctatatgataaattatatattttttatattaagtatagcgatctctattatctaaattatagcatcacaattcacaaataaaaccgataatgaaactacgtcaaagacaaaaacgtttaataatttgattaggtgaaaagattttcagtaaccttaccattcaaaaaagaattttccactaatttcaaaaggagaaaactgacaaaaatatcccatctttaaaggtaaagattatatcatatctttgacacaaaagagataattattgttctaataatttcatctttataagacttcatcataattgtgaaagtttcgcggtccaaaaaaaactagaaagtttattaattttttctgcaacatatgaaatgttcgaaactttcatatgttgttaatgacatgtggaattcactgaaatataaacattggacataacaaaatcaaatatatattataatgatttcctcataagttaacgtgttatagacaaaaccgaagatacaatgtcttcaagatattatcacacagctactatgcacaaaaggtggcaacgaaaaatcaaactgtcacacaaaaagtgagagccttttggtgttctttgtttcttatctttcaggtcaaaagcgctctgagtcttgttgttgttcttgttcaggttttgtcaaggaattaaattcaccagaaatgcttcttaagagctgtttacagtacatgtcttgtgcttgtgtcacgttcttcacacgactggctctaacccaagcaggctcttcagggacgagacgagagagtccaaatttcagaagtaagagtacatgttccatgatgagaattgcggcgagtcccggttcaatcttccatttgccttcttgatcatataagcataccaagagtgccgagtttgtgcatatggacataactactagaaactgaaacacagaagaaagaaatcactcaattcactcagataaaaacagtgatataaaatcgttattttcttgctatccattgtacctgccagatgtttaaccaagctccaattgttgcagcagcacgaggaagaggtcttcgaagtgtcaccaaaagctttaaagcatttgttcttatttccattacattgctctgtgtaagacatacattcagttttcaagaaaaccaaaagctaaggatgacattgagaaaatagtactagaagtaacgttaccactgcagcaagggcaaaagcaagagggaaggcacaagcaaacatcataatcattccaaactgcaaagccagctcgagggaatctgcaatgcaaaataaatttttagctgagacatttgcaagctacatcaaaacataaccacaaaagatcattgacttcataagtttttcttaccatcgaaaagtccatcttcaagttctaccccaatgcttgctgaatatgtaggcttgaaatattccttctccactcttgaggctatttgaattttccctgttgatgatccatcttccattttcttcttcgtcctggaaaaaggaagcagttatgacatttcttgcaagttctaacttttgcgcatacgctttataagctgcatagatgaataaagagcgtacctagctcgatattttcggtagctgtacttaagataaggtaaagaaccatccatcaaagtccagaaaacctgcagaaaaattgtagtttaaacatatgcaggtaacaacatcctcaaaggaaagtttttatcacagcatcttctctcttttacctgtgagattattaaccgttggatcaatacttgtcgaagtgtcatgaagtttcgatgtaaaagaacatgataaaagatcccaatatatgtctgcataaaatagagcccaaaaacctgcaatgccgaaaatttccatagcaatgattagaaaagagaaacagtgactctgcaaaacaatgcttttcttactttgtaaatcaagctgttagctcggtattccacactctcgttgatttctcggtttatcagcttgacagatactttccctcctagccgagtgaggtactgaatgattagaaggtagatagctgtcaatacgtacctgagaccatcatagaaaattgtcatgattgtaacaaagttgctaacacatgggactggtaaagcttgtaaacaaaaaaatgagtaagctctcacttgattatatcagatgtgataatctcgaaaatatgagcatacgcgagctcaaatggaagttggaggcagataatgctcatgataacaagaacatcattcctaaacctcttgcgataagcaaaccattcatatctctggtaggcttccttctctttggctctctcatttccgagattcttaataagctcctttggaaaaggaagggaactccattccattccgagaaatctatatccttggctggggccaactaaacaatttatctgccatctattgatagagaattgacacaaaaaaaagaaatcagaaaatagaaaacaaatctaaaattgttgcagaattatgcatcagtgtaggagtttcctacctggctaacaaggccgcatttttacgtttccagaactgaagaaacaaggcagcccagagtattgtgcccacaaagaaacttgggagagcaagaaactgcaaggatctgatcaaagagatagaaaacaacgcatgatggatgtgccggcatgtctattagtatttacttaagaccttgtaacagagttaagaacttacccaaaatcaaccatctgcactataaacccaagtaaggctggaaatatcaaccattgcgtatacattcccaagaacgaaaagtagactccaatctgtgatttttctatgttatgagtttcatatcaacacctttctgctacataaatcatattaatatttataagtgtctacctttgcaccaaagtaagagtagatctgatcaattggttggtttgtgcagttccaccaatttaatgcccaattttggagaagttcctttctcttgagttcatctacaaccaaatgtttttgtgagaattcttaaccatctagagtctagactccttgtaacccaacagatataacagagtagcttaccatgaagaggaaacatttgtttaatgacgccctctgattccaaccttcgaagtaatgattcccctgctgtccaacaaaactctctgccgtcaagtttcagagtgacatcgtgtccaccagagtttacctgtaactcaagagttcatttgctatgtcataaatcaagtacactgtaaactgacacactaacgcaatcaaaattgagttaatagttaaattcacgataaagacagatgttttagagagatggaacttacaattccataaataagatgttgatagcaccgaaaacgttcaaaccagctgaataataacccatcaggttgccgaatgaaagcctcagacccttgcatctcaaagggaagatcaattcctgaagtgagagataaccatcaaacttaagacaaacacaaaatgaggaaatatctgcgatacgagtaaacagtagtatttaccgagacgagtaggtttgcgtatatgaagctctgcagctgcattgcccaagatctccgaaggagctgctacctaaagagatacttgaattgctgttatctcaaacatcactctcataatagcaaaacactcttcaaacgtcaaagtattttacagatttaaagctaaataaggaaagaaacttcactagatacttcgtttaaagttcccaatttgttgaatcctagacataatatagcaagttttatcaaacaaaactcaattctacttgactttcagataagtaattttgtatgaaaaatcaaagactttcacacctgaaaacccctatttggtcacaaaattacaagtaaattgggcaaagaaagaccgaccttgagaaactcatgagcaagaccgacgactctatcaacaaccatccctttcttccttagctcagtcaccaaaacctcaacacagtctccttcttcttcttccagaaccctcttaggaaccaccattgcaacctcgtgaacaactcgctcctccccattactcccattcatttccaaaaaccctatcacacaagcagaattttgagatttcttctcagtagctggaaagcttcctttttctaagatctgactcaaaatgcccaaatgtgtattcaccaaagaatccacctttattcactttttttcctctgaactacttttctcctctgtaattaatctaattttccggtttctgggccacaaaaggggatcagggttttaagtcagaacactgcaaaaatcaagaattcgattccaacattccacgaaaaggacctaatttactacgtatctctcacgaatttgaatcttccattacttcaaaaaaacgtttctgggaaatggaagagacaagacaaaagcatttggggtttgaatttgaaacttagattgaattttggaaagaaattacatgcaaaacaatccaaaatactttaattttgctatgagttggcacgcagatgatgattgatccatcgtgtaaaaaagagtgacacatcggacggtgctgagtcacttttgacacgcgtgccttgtgtgtgtgactgtttattatcaccatgatatataaatcaaaccgggtaatgaccgacatttcgattgaaccggtcaattccgattttgacttagcttccttcctcccctcttcttcaaacatcaacgcgtcgagatattttccccaaatacagagaaaccctaaagtctctgtttttgagaatttttctaccgatagatccaagcgaattgatctagaggaattgatccaacatgggtaacacagataagctgatgaatcagatattcgatttgaaatttacgtcaaagtctctgcaaaggcaatcaaggaagtgtgagaaggaagagaaagcagagaaattgaaggtgaagaaggctatcgagaagggtaatatggatggtgctcggatctacgctgagaacgccattcgtaagcgtagcgagcagatgaactatctccgtctcgcttctcgccttgacgctgttgttgctcgtcttgatactcaggctaagatgaccaccatcaccaaatccatgaccaatatcgtcaaatcccttgagtcttctcttgccacaggtatttcatcgtctgtgaattatacgaattatcttcgataggttggatatgtatgatcaccatggtttatgttgtattagttaagagttaagagatttgtccaaaaaaaaaaaagttaaaagagttaagagaggtaatgtaaacttgaaggatgattctgattatagatcaggaaggttttgtttatatggaaatatatgaaaggtttcatctttagttcatttgagcacaaatgtaatttgatttcttggggctgtttacaatattggttcttatctgttttctgtatccttcaccagggaatctacagaagatgtcagagacaatggattcattcgagaagcagtttgtgaacatggaggtccaagctgagttcatggagaatgctatggctggttcaacttcattgtccactccagaaggcgaagtcaacagccttatgcagcaggtggcagatgactatggtttggaagtctctgtggggcttcctcagcctgctggtcatgccattcctactaagactgaggagaaagtcgatgaggatgatttgtcgaggaggcttgcggagcttaaagccagaggataaatgcgctaaccaacattcatgcttggattacctgccactttgcatgcgatccttatcgaattgttgcttctattatccgcaaacacgggcgtatttgtgtatattgctcactttgaaatatgctttgtttataactttatataaaaaaccttcgtgtgtttttagtttttaccatttgaatgatatgctttccttttgagttgttcattaaagagtgttttgctcagtcacttttggtctcatggactaagatacatctaacatccttatttgtagagtatagttttacattctatgcaaagggcttaaatcatgctactatccttgtgagccagtgaatcttctttcggagcttgttgatcatcttggttgatttagggcgtgatagatggaagccgatggagtcaaggtaccagccactcctaccgttcataccaacaatgcgtcccccattgactgagaaagtgaagggtgttccctgttcaactccataaggtccatacacttgtttattgctcttgaaggtcattgatctgattacaggagtgccactgttaaccattggacagtagtagccactcacgccagtcagatactcctctgggtattgcagctttatctgcagaaattcggttcatgtaaaagaaaccaaaatctgagggaggaagttaaagagagacataatccagagtgatagaggaacatacctctgatgttttgttgcctcccacacctccatgcttctctgactttgcgggtttaccattcttatcgtagatcaccgagatggagtcaatgcaatggtcataaacaagtctgatctcacggacaccatcataaatcccatcatcccaagtggttcctccatttcctccccagggtcctacgaacactgtcagattcttatcaccttgttgttgttgatccatgagtcgtcctgctgtttaaatgacagctaacttttgtaaacacaatggaagggaagatgctaagaaaccaaagttttacaacaaagaggaagctgctattaatctgataccatctatggagaatcaaactcgttcttcgatgtagctgaagctttttggaactaaaacaggttgcagatcaatgaagaacaagaattgagagtttagcttttgcaacacgcatataaaaagacgtgcatgcttcatgggaaggtattggattccaggacagcaatgtaagaggacgatagatatgtgtttaattgtcttatctttctttacataaagaactaggagattccagaaaacttcaagaagaaacatttacgtggaacaaattccaaaagtgttcatcatagtgccaaaaagaagatgagaggaatattatattacctcctgttttcacattatcaatatttaagtttgctctagtatgtactatgctatatgaacatgtcctctgctttctgacacaggaaggtttgaaatttgccataatggttactctgaaagtaagatcaggccatttatcattatatctcaatcctgtttttttacatgaactatagacgaactcctgtactccgttattacatgaattaaccgaggagtccaatgatagaaagaaaaaatgaacaaactaactgtagaaccatctgatagagagctacaggtgaacgtataacagaaaaagaatcagcaaactaatccagaaaatgcgaaagagcccatcttgcggaaatcatttctatctcatcctctctctcagcatcttcagccccatgtacctgcaattaaagccaatgaaatttgtttttaagtctggtcaaaaaggactgatacagtttcgaagagtatacactttgatggtttcttcttaccttccaagcatcatcaaggtagcctgaggattagtccctggagagatattgaaggttgatccatccacgagtctaagagaattaacaccaatgactttgagatcagagtccactacttttcctacaacagcgcctccatggtagtgccagattgtgctcacagttcgtctgcagaaatctgccatcacaagatcatttgattggtccacaggcaatggagctccaacaaacctgaacctacggttcccaaaccattcccttatcataaagtcctgcatagctcggctcctgagtatttctccaatcttcctagtcccattgacacatctctctagatcctgtggatcactgaagtagttgaatctaacaactgggttaatcctcacatccgttgacgccaaccttagtaaaccaatagacactggacctaggatcttttccattatagttgtcacagggacgtacaaaggagaagctggagctctgatgaacacagaatgtaaaggcgatgcaaacggaatcacattcgaagcagcctccagaaaagccccatcctcagtaacacccacgacttgtatcagtgagttctccattggaaccggaggaacaatggagataccattcctcgggttatcatacacaaaatcccccacatgaggctggtcaagagccacagggatcccccaagttgaaagataactccttggaccaatcccactaagaaaaagcaactgtgggctaccgagtgcaccagcagacagtatcacctctcctctgtcccgtatcaatgcgtgatggaaacgtcccagctgatcacggtaaaccactccaatcgcagaaacgttggaacctgagacactaggagatgaagcaagcaatactctctctacagttgcgtaaactgcaactctaatgttggaactccttgcatatctgagaagatctgcagagctgtgtctcctcccagtacgatcaaacgtggaacctccgatcttagtccccactttatgctccaaggtgaagccattaaacggatggacaccaacttcaagcaacgcatccctaattgcagtttgccaagtcctgagctgaggtctaaacacaatcgctctctcaacccactcataagactgattcacactactcagatcccaaacaagacccgaattctcaaagaactgtttatcagcacggctatagaatccagcattgatcgcactacttcctccaagaacacgacctctcgcgttaggaactccttcctcagagatgaaagactgagccggcgagtcgaaattgttgacgtcagtgagagtggtcaagaaaccgtcgtgtgacatcacgttaggtctgttgtagggaacgccaccgcgttctagcagaagaactcggaaagattgcgaaagtgtggcggctagtggacatcccgccgttcctcctccgacgattatgtaatcgtagtaatcctccgacgcaaaatcagttgcgttcgatatgaatcgcatgaaaccgggagctgcaacgaaggttccaacagtaagaaacaacaatgaaagagaagaatctcaaaatcaaattagggataagctaaacatcgatcatcgttttcttgctattactcaaaagcgatacaaggaaatcaaagaaacctcatcaaaaacttcttcgtcgccaaagattatgatgtttcaagcattaacatgagattctacagaaattttctcggaaacttacgtcgattaacgcgtggccttgcattagagcgatgaactactccaagaagaagaagcactacgagcgccgtgtagagaagagaagaatcaatccgtttcgtcattctcgttcttctgttgaagattttctcggagctgatagaaaattaaattttctcgggaaagtgagaagtttctcagttagagagagaaacagagtaaaagtagttaaaaaagaagactcaaattaaatggcgcttggattctgttatagagagagtttctcagctctggaactctgatataaaagtaatcacagccgtcgatgaggtttagaccaagttgagatcagcggttgtcaagagaagtagtcctgagctctaccgcagtggataatagcatgcaatatatttgacgccgttagcaaccgtctctggaccctttaacgtcgtcgtcttgttgtaaaagtaccgatttgataactgccaatcaaattccggttcaatccggttaagggaagataacaggatttagccacgtgtcatgaggttgtgcagattagactgtagccagtgttatcactaccgtctaaacacagagagagagagagagcaaaaatggctatggcgattgcgatgttaccggcgctcttctcttctccttcgattctaaccagcagaatcagatgcggagccaccgcaaacagcggcggcgcaatctcatctacttcttctaattccgatcctaggagaggtgttcccttgtataagcccaaatcatacgaggttctagccactgacgccgccaattctctagctttcgctctccaggattcaaaatctcgtttggaaatcgattttccgtaatctccctgctcttactctatctcaattatctgaattttgtgctctgggttcgtgattttaatggcttctttggctctttttgttcatgtgtagacctttacccagtagcatttcttcttacaaggtaagctttttttaacttgttaccattgtgacttagttttttagcgaaattttaactgtgttggttttgcaaacattgtatagggttcttcagacgactttattgatgctaatatacaactggccgtgactgttgttcgcaaacttcaggagaaaatcgagaccagagcatgcattgtaatctttctccttcattactctatatattactcatcctttttatttggttcttctgacctatgaatgatcaaacatgttccaggtttttcctgacaagcctgagaagcgcagggcttcgcaacgcttcaaagcggcatttgattcggtacaaatagaacttccactttgctgcaagtttttgcacatgttaggaataagatattgaacacttggatcttaacaacggcttatttgtgagtgtctcatcaggttgatggcataagtattggctctctagatgatatacctggtacttctgtcaccaatttctttaggtccataaggagtaccctggactttgattttgaagatgaaaacgaaggtatagctaaaactgtcctttttacttattttaacagatggattattgcattttagtcatgaggattatgtgttcctacaggaacttgggagcccaaggagccaccgaccctttatatatttatcaattgcagcactcgggaactctctttcatagagaagtttgtggtattgaatccttttatcttttcttatcgttacatggaacttggtttagatatattcactgtctatggtcatttttaaattttctttgtgccttctatatagttctgtaagttgttggtctatacttgcaggaaacctttgccagttcaaccccagctcttctgttcaatcttgagctagatactttgcggtattatcactattgagatctcagttttttgcgtaactcaatctctctcggtttcctcacttgtggtgacaattgaattttagtgcagtgctgacctagggcttcttggctttccccctaaagatctgcactaccggtttctttctcaatttattcccgtcttttatatccgaaccagagagtattcaaaggtactatacaattaggatgatattttcttagcggacctttcttggctgcttacagaaatgaagcagcataatagttgtttgtgttgcttggctaagacagtggcagtggcaccatttgtgttgaactacaacggagcactttttcgacaatatcctggtaaatgctagactattctttacaagactaaaacaatatatatcatagctgtacctatttgtattgtgacttccttgatcactaagcatgatgtgatgcttgtctcagtctctctatcagatttgcataatcattctcaattccagtgtcctgaacatgagagagtgttttctctatccatatctgatatggaaaaaaaatgcagggccatggcaggtgatgcttaagcaaactgatggttcatttgcgtgtgttgcagaaagccctactcgtttcacgctgggtgaagtatgtgcgctaaaagcgtttaaccttttgaatatagtcttttttatccaatctctgggaaaaaagtaacaagcttttattgatgtggatgcaaacagacgaaggaagagctgttacaggttctgggactacaagaagagaaaggaagctcactcgagttcctgcgcaggggatacaaggtttagcacattgtctagattgtttttgtctctttcttgtatatgcgcatagaagcttaaactggtccgaaactgatggtgttgcagtcggcaacttggtgggaagaggatgtggagctcgaggcatcatctaattggcgtaactgaacgatggccaagtcatggattcacacttttggtaagtttgttaagtctctcaagattgagatatttacacttgtatatgtgcaaagttggtagagagagtttgggagatgttaatgggaatgattaaggatagtttcaatatgttttctatatataactcagtccaattatgatagtgtctgctccacccaaacacaaacgcagactatgaaaaatcataggaaatgacaaagaaactattttaggaatatttacaatttaggtagaatatcaaagatctcctcaatttgctgtataatggtcatctaatttccaacttatcaacttccttgttaacaatttaggtagaatatctaagatcttctttctattattggcgtcaatcagatcgattataatctgtcaatatccttcaaggtgtcaatcaagttctattttgtttccctctttcctctctcctcttgcccttgtctctttataacatgcgagctccatttgtacatttttcttgattttcaagtctcagatggagaatcttgggttgttccaaattcttttgctattctgtctctttgtctcggtccgcatagtttctgtttcttgtttaaattcagatgggttaactttactctcgcttcggaagcatttggacaaagtaccaccagaattaacttcgacatggaagactaacgcatctgaagccactccatgtaactggtttggtattatctgtgatgattctaagaaggttacgtctctcaacttcaccggttcaggtgtttcaggccaattgggtcctgaaatagggcaactcaaaagcttagagatattggatatgagttctaacaatttctctgggattataccttccagtttagggaactgtagctcacttgtgtacattgatttgtctgaaaatagtttctctggtaaggtccccgatactctcggtagcttgaagagcttggccgatttgtatctttacagcaactctcttactggggaattgcctaaatccttgtttcgcattccggtgttgaattatctgcatgttgagcataacaacctaaccgggttaatccctcaaaatgttggtgaagctaaggaacttcttcatctgcgtttgtttgacaatcagtttactggtacaatccctgagtctattggaaactgcagcaagctggagattctgtatctgcacaagaataagttagttggttcattgcctgcaagtctcaatcttttggagagtctcactgatctgtttgttgcaaacaacagcctaagaggaacagttcagtttggctcaaccaaatgcaggaatctggtgactttagatttgtcatacaatgaattcgaaggtggtgtccctcctgaactgggaaattgcagtagccttgacgctttagtcattgtgagtggtaacttgtcaggtacaatcccttcctcattgggtatgttgaagaatctcacaattcttaacctttccgagaatcgtctttctgggagtatccccgcggagctcgggaactgcagtagcttgaacttgttgaagctgaacgataaccagcttgtaggtggaataccaagtgcattaggtaagctgaggaagctagaaagtctggagcttttcgaaaaccggttttcgggcgagattcctatcgagatatggaagattcagagtcttacgcagttgctagtttatcggaacaatctcacaggaaaattaccagaggaaataaccaagctcaagaatctcaagatcgttactctcttcaacaatagcttttatggagtgataccacccaatttaggtctgaacagcaacttggagattatcgatttcattggtaacaattttacaggtgagataccacgaaatctctgccatggaaagatgttgacagtgtttaacttaggatctaaccggcttcacggcaaaataccggcatccgttagtcagtgcaagactctaagcagattcatcctcagagaaaacaacctttcaggctttcttcctaagttttcgaagaatcaagatctttcgtttctcgacctcaatagcaacagcttcgaaggaccaatccctcgtagtctcggaagctgtaggaatctcacgaccatcaatctgtctcggaacaagctcacgaggaatattcctagagaacttgagaatctacaaaaccttagtcacctgaatcttgggtctaacttattaaacggtacggttccttcaaagtttagtaactggaaagagttgaccactttggttctctccggaaaccggttttcaggattcgttccgcccgatcgccactcttagagagaaggaaaacaaccatgtattccagtgacatcatatcaaacatttttactatacaacatactctcttttttttctttgcttaaatcgttgtataccttttcaccattcttattgccgcttagtacatttttaattgataacacaaaagtttcggttgataagatccaaattcataatatacaaaattcttatttaacattcaataagaaaaaacaaaatttgctaatgctacgatgttacccactcggaagcttaccatagtctgttagtcatagtttgaaagtcaatttggtcagctgtagcttacggttaggctgttcttatcaaataacaaaaagaatgtcaaacacgtattttatcgtattcaatttagggcacgttgataacgtttccaaaacaattattcaatagttggtaatgaaaattaatgaaagacccaaacctaatgaatgttaaccactaattgaccattcaccaaccaattatttaatgaaatatctttgttagtttcgttatttagtattgttaacggtttcttactctttttgactacatcagacggacgtaaaacgacatcgttgtcgaatattcaaaagattcacaatttgacaaagagaaacagagacgacttgtttctaaaaaaaccacgtgtgtctgaaaacggaaaaaaagaagactgaatgagaaacggcgtgtaaaaagaaaacgcgttgaaggttaggctctcacaatcgttggtatacagagagaccaaacatctcgtcataaaaaacggcaagaatcatcagttactttatacccatcaatcaagtcttgtcctttttctccttctctctctcatacgagcttctttcctgctgatgaggcttgagctttaaattttcaatcttgattgagattctgcatgtttctcgatctttaaactcagatgaagaatcttggggggttgttcaaaattcttctgcttttcttctgtctctttctatcgacccacataatttccgtttcttgtttaaactcagatgggctaactctactctctcttctgaagcatttggatagagtaccaccacaagttacttcgacatggaaaataaacgcatctgaagcaactccatgtaactggttcggtatcacttgtgacgattctaagaatgttgcgtctctcaacttcactcgttctagggtttcaggtcaattgggtccggaaattggggagctcaaaagcttgcagattttggatctgagtactaacaatttctccgggactataccttccactttaggaaactgtaccaaactcgctactctagatttgtctgaaaatggattctctgataagatcccagatactctcgatagcttgaagaggttggaggtgctttatctttacataaacttcctcactggtgagttacctgaatccttgtttcgaattccgaagctgcaggttttatatcttgactataacaatctcaccggtccgattcctcaaagtattggtgatgctaaggagcttgtggagctgagtatgtatgcgaatcagttctctggtaacatccctgagtcgattgggaatagcagtagtctgcagattctttatttgcacaggaacaagttagttggttcattacctgaaagtctcaatcttttggggaatctcactactctgtttgttggtaacaacagtctacaagggccggttcgtttcggatcacctaattgcaagaatttgttgactttagatttgtcatacaatgaattcgaaggcggtgttccacctgcattgggaaattgcagtagccttgacgctttagtcattgtgagtggtaacttgtcaggtacaatcccttcctcattgggtatgttgaagaatctcacaattcttaacctttccgagaatcgtctctctgggagtatccccgcagagctcgggaactgcagtagcttgaacttgttgaagctgaacgataaccagcttgtaggcggaataccgagtgcattaggtaagctgaggaagctagaaagtctggagcttttcgaaaaccggttttcgggtgagattcctattgagatatggaagagtcagagtcttacgcagttgctagtttatcaaaacaatctcactggtgaactacctgtggaaatgactgagatgaagaagctaaagatcgctacgctgttcaacaacagcttttatggagcgataccaccgggtttaggtgtgaacagcagcttagaagaggttgactttattggtaacaaacttacaggagagataccgccaaatctatgccatggaaggaagttgagaatactcaacttgggttctaatctgcttcatggtacaataccagcttctattggtcactgtaagaccatcaggagattcatccttagagaaaataacctttcaggtcttcttcctgagttttctcaggatcatagtctttcttttcttgatttcaatagcaacaacttcgaaggaccaatcccgggcagcctcggaagctgtaagaatctctcgagtattaacctatctcgaaacagattcacggggcagatacctccacaacttgggaatctacaaaaccttggttacatgaatctttctcgtaatcttcttgaagggtctctaccagctcagctatctaactgtgtgagtttagagcgttttgatgttggcttcaactcattaaacggttcagttccttcaaactttagtaactggaaaggcttgacgactttagttctcagcgagaaccggttttcaggaggtattccacagttcttgcctgagcttaagaagctgtcaactctgcagattgctagaaatgcttttggtggtgagattccttcgtcgattgggttgatagaggatctgatctatgacttggaccttagtggaaacggattgacaggtgaaattccagccaagttgggagatctcatcaagttaacaagactcaacatatctaacaacaatttgacaggatctttatcggttctcaaaggtcttacctcattgctacatgttgatgtctccaacaatcagttcacaggtccaataccagataacttggagggtcagttgttatctgagccgtcgtcgttttcaggaaatccaaacctctgcattccacattccttctctgctagcaacaatagccgcagcgcgttaaagtactgtaaagatcaatctaaaagcaggaagagtggccttagcacctggcaaatcgtgctaatagcggtcttatcgtctttattagtcttggttgtggtccttgctcttgttttcatttgcctacgtcgtcgcaaaggaagaccagagaaagatgcttatgtcttcactcaggaggaaggcccatctttgttgttgaacaaagttcttgcagcaactgacaatctaaatgaaaagtacaccattggaagaggagctcatggaattgtgtacagagcttctttaggctccggaaaggtctacgctgtgaagagacttgtattcgcgtctcacatccgcgctaaccagagtatgatgagggagattgatacaatcggtaaagtcaggcacaggaatctgattaagttagaagggttttggctgaggaaagacgacggtttaatgctgtatagatacatgccaaaaggaagtctttacgacgttctccacggtgttagcccgaaagaaaatgtgctagactggtctgcacggtacaatgtagcacttggtgtcgctcatggactagcctatctacactatgactgccatcccccgattgttcaccgtgacatcaaaccagagaacatactcatggactcagatttggagcctcacattggggatttcggtttggctcgccttcttgatgactcaacggtttcaactgcaactgttacaggcaccaccggctacattgcaccaggtaatgcatcttctcattatacatagtggacttggtataatctggtttagtgttcaaaccgagttagttaccggttaaaaaagtctgttaggaagatactctgtttcttattagctaatttcacaattaaactgcagaaaacgctttcaaaaccgtgaggggaagagaatcagacgtttacagttatggagtcgtgttacttgagctggttacgaggaagagagcggtggacaaatctttcccggaaagtacagatatagtaagctgggtgagatctgccttgagcagcagcaacaacaatgtggaggatatggtaacaacaatcgtcgatccgattctcgtggacgagcttctggattcgagtcttagggagcaggtgatgcaagtgacggaactggcactgagttgtacacagcaagatccggcaatgagaccaacgatgagagatgcggtgaaactgttggaagatgtgaaacatctggcaagaagctgctcctctgattcagttcggtaatctcgttactttgtgcagagcagaaggaggaaactaaaggactgttatcagtggtaacgtaactgggcttaccggtaatgtaactgggccaataatgtaaaatatggcttattgaaggcccaaatatgacggccctttaattgtaaccgtgtttgtttgtgaaataaaatctcgtttatcaaatttctgtttcctattttatttttaaaaaaagtgttgggaaaattttcgtttggccggagatgaagataggggcggttcaggagagttggcttatacggactccggtacttaggccggcggttcaaggctcaattcgccggaatggaaagccgcagcttgagtttcctctctcgaacagtgagcttaagctcttctttcttccattgaattttttttttgggaacgcattatcttgtgcacacttgtagtaacttggtctatatcaaattgaggttgaagatgaaagttcagttatttcctgtgatttgcaatttccttgttgattgtatgttgtatttgagtcttgttggatatgtaaagagaacaaaaagagagtgagagagtgagatttgtgtgataaattttggattttacagggttgtctcgttgtgtggttatggctgttcaaggagggagaggatatgaatctccatgggatgaaaaaccctatgaaactcttcctactggtaaaagggtttatgttgatgaatctgatgttgtgacgtttcttgatccccccaaggagttgattccattggaccctgcttcatataacccggctgcttatctctggttagtctgatttggttgatttagttccagaattgattcattctaagctaattgatagcatatataacttagtcataacactagtgatagctatacatcatggactatgattaggtatttgctgcagtttcagtttactgtttctcttcccttgcttatgagggattgtttagcgttatatcatgattaatgttgcatagtcttaggtttgcttttcaaatttgtgtactgtttaattacctgttgattcatgatgtttcatatattaaaccaagaggatcatcaattggagttatactacctgtagttcataaagtagctgttagatttcatctgacgtattagaaaatactaagatgactgtttaatagagttgatattttccaggaaaaagattgaagacatccccgaagagaggcgccaccatttgctgcaattattagagccaaggtcattctttctgaattcttatatcgatatttagctttgctgtcatgtggttttcttacgtctctgggaaaagattggattcatatgccaaagaagttgacatggaaaaagaacttagagcatgtacagttttcttcatgagagtgtatgtatgcaggcttatatctagagcatgggaaatagcaagcactcggtatgaagatccaaagttagctaaaatgactgcatccaagatattctctgctggaaatgcggaaattccagttgaatacttcagctgccgaacaagtcagggtaatccattttaggtctgagcccctacaaatataaatgaatgtgtatgttataaacgtctggttttgcattttgatgcgtatgttcttgacaacatctaaagtaatcttctcttattggttaggtccactaatcatatcttggataaatttcttcaagatggttagtcggactgatattacatccatccctatttcaatctatcctgtgctatctttcttgacatagttaatgtgttacttggtaggctttgtttcgctcctacaacggccaaatctatgggcgagtttgtggtgagtccttatccaattaatgtttctttcaaaataaacaagtgatatagtttccattcgcactttctgagagtttaatctcaaaaatctgaagaaatgcaatcgtgcaggtggaccggtagtttcaacccttgccaatgctttcagtccactatactttgaggtcacagaagcaatggaagtaatggccacagaagaaccctgcgatgtagcgtgcaaattcggcgatgggcttcttgctattgaagattacccacaaggcttccctcgaccaggtaagactcattgcttatacttacttgagattagccacttccacttttctctcaaaagaagactattagtaaattcccactgtgaccatatagacaattctgagcgttactttagcaaaaccttctataaaaccaaagcgtttctattgaaatatcattcagcttggagaaattgagcatttagtaaagcaaaacgagaaacacataatcatatatgagtttattacttatacatctcaggtttgagagtagcatatagacaaaggtgtctctaaacctcatagcttcatttgttttctctttgcagcaaaacatccttatccattcaacgacagtgtcgtcatttacatacggcacatcggtccaggtgtatgcgtaggacaggcatggcaagaaggtagagaactgcaacaagttcctcaacgattatgctcggacattcttatggtcaaacaatacagatgaattaagaaggcttttgttaactttagattccaagcttttcacattagcttgaagagcaatttgttcacttgagttagaagttgaaaatgaattgttttggatcggtgagttaaaactatcttaaattgtggccgatttggcaatatatgttgtaagtagtaagattctgattctgatatccttttaagacaaattatactagtattacaagactcaatcttcttacataatacaaaattcagttcatggttcgaaatttggagtaaaaaggattgaaataataaaaaaaacattcaaatatcttttggaaataacaagatatatgactctgttttcatgtatagattgttgtgcatcatctttcattggtggtggataaaaaaaaaaaagtgacaacagtttacacgaagaccgaaagaaaggaaaggtagcaataggttgtgtaagaaaatttcatctcatcatcattttcaagacacagaatatggttttgacggcggagatgacgcaaacgtgaatctaacggaccgtattctctctgtaacaccaacgtcttttgcttatttcatctgtagcaaatagtcaaatctgaaaatgctttaatgaaagggcgtctctgtacacgtagccacttgcttctttcactctctctctctcgtcaggaatcgtctctgctctttcatcatcctccggtctctctctccctctctctaattcggagcgctaatttctgttttatcatcttcttgagggttcttctagttgcatagctaggtctaaataaaaaagtagggatcttgatgcaaaaaggaaacttttttttcctggtttccctaggcatgaaagatctgttggtgtttagaatttgtgggcttcaattactttgacttctaggttgatgattttgttacattttgggggaagtaatctatgaacgaaaagcacaaactgctatgtattccttacgaagcgcttttagatgcatttaggttttatgcaaaaagtcccataacttgttgtctgatatcaaagttttcattttgggaagtgaatgttaaaagattttctttatatgtaaatggattcgtttgtatgaaaaaggttttgaatgaaatgctattgcagtaattgactctttccacttttggtatagcagagaattatcacacaaggtcactgcaaggtgtgtacgagagggctaaagtaaatggtgttgttgtgatattcatcttatttttgacagcttgaaatagaggtacatgggagattaagttgtactgtcaatattttacaagctaatctaagctttggttagtacttttagtccaaatgttggttcttatttcctttcttcttactttgacaggagtttagcaatgcaaggagttcctggatttaatactgttccaaatcctaaccattatgacaaatcaatagtgttagatattaaaccgttgcgaagtttgaaacctgtttttccaaatggtaatcaaggtccaccttttgttggttgtccaccttttggtccttcctcatctgagtattcttctttcttcccatttggagcacaacaaccaacgcatgatactccagatctcaaccaaactcagaacacgcctattccatcatttgttccacctcttcgatcgtatagaacacctactaaaacaaatggccccagcagctccagtggaactaaaagaggtgttggtcgacctaagggaactactagtgtgaagaaaaaagagaagaagactgtggccaatgagcctaacttagatgttcaggtagtgaaaaaattcagttcagattttgacagtgggatcagtgcagcagagcgagaagatggaaatgcgtacttagtaagtagtgtattgatgcgttttgatgcagttaggaggcggctcagccaagtagaattcacaaagtccgctacttctaaagcagcaggtactctgatgagcaatggggtgcggacaaacatgaagaagagagttgggacggttcctggaattgaggttggagatatcttcttttcccggatagagatgtgtttagtgggtcttcacatgcagactatggctggcattgactatataattagtaaggccggttcagatgaagagtctttagcaactagcattgtttcatctggacgttatgaaggtgaagctcaggatcctgagtcattaatttacagtggacaaggcggcaatgcagacaagaacagacaagcatctgatcagaagcttgaaaggggtaatctagcattagagaatagcttgaggaagggaaatggagtaagagtcgtaagaggggaggaggatgcagcttcgaaaacaggaaagatctatatctatgatgggctttattcgatctcagagtcatgggtagagaaagggaaatctggttgcaacacctttaaatataaattggtgagacaacctggtcaaccacctgcgtttggcttttggaaatctgttcagaagtggaaggaaggtttgactacaagaccaggcctgatccttccagatctcacctcaggagctgaaagtaaacctgtttcacttgtgaatgatgttgatgaggataaagggcctgcttattttacctatacctcctctctgaaatactcagagacctttaaactaactcagcctgtaattggttgttcctgcagtggttcatgttcaccaggaaatcataactgctcttgtatcagaaaaaatgatggtgatctcccttaccttaatggggttatactcgtttcccggaggcctgtgatatatgaatgtggcccaacgtgtccttgtcatgccagttgcaaaaacagagtgattcagacaggactgaaatcccgcctggaagtgtttaagacaagaaaccgcggttggggtttacgttcgtgggattccttacgtgctggttctttcatatgtgaatatgctggtgaagtcaaagacaatggcaaccttagaggaaaccaagaagaggatgcgtatgtctttgacacatcgcgtgtttttaactcgtttaagtggaattatgagcctgagcttgtagatgaagacccttcaactgaagttcccgaagagtttaatctcccatcaccactcctaatcagtgccaagaaatttggcaatgtagctcggttcatgaaccatagttgctctcctaacgttttttggcagccagttattcgtgaaggaaacggtgaatcagttatccacattgctttctttgccatgcgtcatatccctcctatggcagaattgacatatgattatgggatttctcctacatccgaggccagagatgagagccttttacatggacagaggacatgtctctgtggatctgagcaatgtcgtggttcattcggatgatctgagagtttgagactgtttatctaattaacacaatccgtttgaaaccatttatattgtcacaggacagaaagtatgtgtgtagcagagtaagtggtggcttttgttcttcttcttaacgtaatagtggttgccgtttttgaaaactgtgtattgttatgtgaatgcatacacatctaatatattgtttatgtattagcaccacatcggctttaggttcaaaatgctcatggttttagtataaacaaactctatagagtgattcggttaatctttttaagcttttgtaacaacttatcaggattcagctgagtgttcctcgaaagtcactttaagaatgaaaaaaattgatgtttgtttggtatcaatcgtccatgttcttcatgtactccttggaaagctttgtttccataataagtttctgttcatttatgagtgagtaccctgattccagcaatgcttccaccgtttgctgttcacacgatatcatcagtcaatcttaagtggagccaaagcttaaaggttttgagagagagagagatcattgagaagtctgtaagcatttttacctcaggggcagtgaattgaggaacctcttgggtctttttacgtctgagaagaactttccctagagtctccattcctccagcttcatctacccactgtaacaacaaaaagattagccctttcactgcagagttttaatcattaacagctggttcgtgctgaagttaccttgaggatagacctatcatatgtgcgtgacctcaaagctccatagaagtcaagtgctgccacaaagatagaaatcataacgaactgtaccttttttagtttctcattctagatagtaaactatttaccttgatttggaaacttatctacaatgcttataacatctttccgcgatataccatctttctcgtacattctgctaacaatgtttacgatatcttcacgagttggctgcctgttttttttttagcatcaaacacttcagtttgttgtcagaaaagattccacagttgcaggaaaatggattgcaagctatgtatcatgattaccagtagaacttctccattcttccttcacggatcagtggagcatacagtgtagagaaatcgttccctgtgacaattagaggaactctgtttaccatgtcagcttctctccattcttgtcctacacttacccttgtaggattatccgcaagattcatcagggtaccaacaactatctggttgtttactgtcatttgcgtttcccctaaaccaagagccaaaacctcagttatgataatctttgcggatcaaaagcagagtcacaacatagctcaaagttatctggggttgacattatttaccaaatctaccaaggccagcatcaatatcattgatcatgagaacactcatctttccctgcattatcaaaatcatcatcaaagttcattccaaacccatatagataaataggttaagtaagactggggaatgggaatggtaaagaaacgcttctaacttgattctgaatgacttgtgaagctgttcgatagcggtcacgtatgagtctccccggttcacctgttagggaatattagaaagatcagaactttcaatagcactatggtcagtgaaaccaaccagttcctaggaaatggtttactacatagtcacgacgatatgggagtaaacaaagttggaaaaaatcaccagctctatcagattccaactctcctgcagacattataactggttcaactcccattgttttgaatataagttcagtctgaaatgttttgccttgtcctttacctccccatatacctaagcagccataaaaaaacacatccatgttcaagagatggttgcaaaatttcaaacactgctactaaacagagaagaagaaggcattcattacctaaaatcaatgggatttttatatttagagaaggagcaaggtagttcttcacaatgtggaccgctgcagaaaacatgcgaaaatcgccatattaaggtaaacagaaaggaagaaagaaacatcacaaatgaatcaaaagttccaaactttaggcagtcaaatatgaaccctatcatccaatttgttgttactgatgtattcctctaatcttcttcaccaaggcttagttcaatatgacttaccaactttatcctgtcaagaaagaagacacatgttcttataagaaaacttggtgacatattcccacaaatcaaagcttagtttgaaagcattttaacaagataaatagataatcattaattaggatatcttcaaaatgagattacaagaagaagaataaacatttaccagaaacgatggagcaatgtaataatctccttgaagatgttcaaaggacctcgtcgccttctgacggtaatcaaacacaatatcagctgcaaattcacagatatacacaagttctgtcaactccacaatcagagtcattgtacttatccaaattccaaaatataggatttttcaaaaagaagaaaaagagacttaacaatcttttccaaggaagtctccaatgaatacatcatcgatcatgccgcttcgtgccccaacggctatgttaacattatccgattccgcgccaagcctatagagataatccttcccttctgaatctttaacttcccatgacgattgctccgacaacttcttccgcggctttgcgccaccatcgtcattagccactttgccgccgtcattagaggagggtttcgagcaaacgattgaagagagttttctggtattgattaaagtagcattgaacgaggaagaagaagaagaagaagattgtaaaggtggaaacttgaaacgcagagatatgtttgcaagcgccattaacccaccaaatcacttcacaattaaagcttctacctttttccctcaatttaataaaaaaagatttatacttttctcccaaagataggattttgaagaagaagagccatttgttctcgtctgatagtggctaattctgtggttcttgaagtcaaaagatagttttggccccacttgttactacttgcatgtttgtatctgtctgaaactatagcaattccaatttgtaagaatggatataagttttttgtttggtggattttggatcaaagctttagttagtcattagaaggtacattatgaataaggcagcagttaatctacatgcattggtagtttggtacgtaactcattttgtaatcatcattaattattcattatcattggttatatgacaatatatttccacttaattacacatatattttatggtttcccattagaacaatagacaataatatagagacttcgagtcttcgacgagatcgagatgagaagagagtcactcgagactaatggatcaagagaaccaattaacgagctcgtccgcgtggctgccagctggaggaggaggcacatcttgcatcactttctcttgtccctttggatagtatattcccgtaccttcatgtggcacccaactactcgccggcgacgacgtttctccggcgccgtagaagcctctcatcgtcttcacctcctctccggagctagagccctcagtcttcaccgtatccctcactatatcatgcgaggcactcttcttgtgaattgatttcctaagcatcggcctatatatatgcaaattgcatgtgttaatgatatataacatgatacataattaaacgatcataacaaccaaaagtgtatgatctaagaatcaatatgaatagagagaaaattagcatggtttatgcgtaaagattgacatgcacgaaacaaataatgcatatgctcaacactaaatttaaggtaaacttacttgacgaacatggtgttcatggtttgtgccccacgagaagagaaggtagaagtcgccatgtaaatctctatggtctattgattacaatgtgtatgaagaatctgatgtaggtaaatatatttatattatgtgtttgttgagagagttgcatatatatacatgagacatcataaaatgtgaatggaatttcaacaaaattaaaataagataaagaatttgggatggaaagaatgatggagagggatcatccagatgcacactccccgaggtagatttatcgtcagacccatgcctcttttgtgccattcccctccacgtggcataatccacgtcttcttattttggatcattcttcttcaaaacgtatgcgtacacatgatcatgttttggtcacttgtggcgtgcatgattcatgacccattcggactactttatttctattgggcctactaaattttataagcccgttaactttagataggtagcccaataaaagcccggaatctatatgtaactttgggctggtattggattctagtttaaaaagaattttgatgatttaaaatcatataaagtaaataaatgaagagaaattggtagagagtattatataattttgttaattagtttttttcgtaattttgtaaagtttcacgaataatttctctattttgacgatatttttatgacgaaaatgtataaaattataaattaataatataataatttagtttattaataataaaaaaaattatgttgttttagttgaataacccaaagttttttttttcaacaactttatcaaattctaaatccaataacctagagttataaagattttttacaaatcacaaactaataacaccaaactcttaattaacttttattattgaataacaatagattctagtaacatttaaagtcattaaatcactatttaaatcacaaaccaataacactacttttttctttttttctttttttaattctctaaattgaatttttattatggatctggttgtaatcctaaattagaatccttttctcaaaaaataaaaaataaaaaaataaaaaaaaatcttaaataagctctttagtatttatttattgttgtatgatgattatgttgaggcctttttctcgtttcttcctctgttgtactttccttcttactttctcaggtaaattcttctctctttccttgtttttctcatctatgtttactttgaatttcagggtttatctccttttgattactttctctgtttttcatctcaaagtctcgtttttttatgtaattcgatgcgtctatgagtttctctttttcagcgatcttcgtgctcgggtcacaaatttgagatagctgtatagtacagtttttctaaattattcatcttttccgattaagcatctgagtttcgataaaatctagacctagtgattagtgatgatggcaaaattttcaggatttttgagctgtttcttagtgaggacctgtttttgttgtttgaaactttcatcttcttattgcgatcaagtttggaataacatgatatttttcaactctttattattctgatgatattgcctaaccaaagtttatatttttgctgcataattttcgtatagcgtgagccatcatgggaccagaatctaaaggacgagcatggtttagtaaaatctacaacaagttggaaaatttgcttgttgaggttgactctttcacttctcaggttagtccattgtttgattgtcattatcaattttagctaataatgtctaaagaatagagagaatgagtgatggttttcttatgttggcacagagcacgctttgtttgaaatcaagtgaacctccgagattcgaatatgttagaggtgaatcaaaggaagttgcagaggaccattcttctaatgtacaaggacgtcatgatcgtgttgcttcaccgcgaagtgaaagtccttctgatccaccgtcacatcagaactttgacattccaggacatgttttggttgagaaacgagttcaaggcgatattttgaaagagaatgtagttcaaagagatagttttgaggataattcatcagcttcctcttcgtctgatggagaaatagaatctacatctccactgcatgaagagtactgtgatgcttatatgacatcaaccactactcttagtgatgaagaacaattagtttctgatgaagagtctcagatatttcctgatggagaaagactctctacatccccattgcttgaagagtatcatgatgctaatctgacatcagccgctagtgttggtgatgaagaaccaatagttactgataaagagtcgcatatcactaaaagtctttctaattcaccaagttgtaatagtccttctgattcaccgccatgtcagaactttgacattttaggacatgttcgggttgaggaacgagttcaaggtgacattttagtggagaatatagctcacggagagaattcatcagcctcctccttggatggtgaagaaacactctccacatctccgttgcttgaagagctttgtgatgctaatctgacgtcaaccagtactcttggtggtgaagaaccaatagttaccgatgatgagtctcagatcactaacactttaacacctcagaaattttctgctgaaaactcttctgtctttccaggcgaggaaagtgtacaagaagttagagttgaatcctccttgtctgacgaagaaatactctctaagtctccattgctcgaagagcattgtgatgctaatctgacatcaaccagtactcttggtggtgaaggaccaatagttaccgatgatgagtctctaatcactaacactttaacccctcagaaattttctgaagaagaaatactctctaagtctccattgctcgaagagcattgtgatgctaatctgacatcagacactactcttggtgatgaaaaaccaataattacggatgatgagtcttggatcagtaacagtttaacctctcagaaatcttctgctggaaactcttgggttttttcaggcgaggatagtgtagaagaagttaaagttaaatcgtgcagagatgttgtttccacagaatctcaatctactcaaagttctatggaaagttttgggactgtagtaaaatgtaatgatggccccgttctagctgcacttgggtgttttagggataatgattcaagtcttaatccactcgtcaccaaggttccagatgaaaacatgagatcctctaatgcgggttagtgcttcaattatatattttctctagtttgaagttctactcatttctggttgtgctattgttcactagaagttgtaaaaccttgaattaacctcttcatgcctttttgttttttggtttctaacatgtgcaacactttttcttaatttctgtagataatccagatgatgtgattaataattgcaaatctgacgttactccattggataccaaggacattgcatttcaaaaagaaccctcgtatgttaatgacacagtgcgtgttaggatcatggctgaactgtgcggcatggaatctcgagaagaccccttgtatgttgaggacagtgagctttatgccattcatcttaggaccaagaaactcagatccttcaaggttccttgctttctccctctttctcttagatatttctttgtgataaacttgaaaccttgtttcttgttagtgaatgctaatcttgataacagatttttctgactgatattagacttgaaaatttggtttcaataatgatagtcaatgaccaaaaaccttctaaaaacttagcattaatcccatgagaaaagcattagttatatcccattgcctaattttaccctttttattatcatcagagaaaggtcttggacgttttaacttcaaagagaagaagagagaaggaatatgagcagcttccgatttggtacggagatgcgggaatgggttctgatctggccactaaggaagagtctcaacaagtggaagccacagactccaaaagctcacttttacttgaatcagaagattcccagtgggagctattgtgagagttttgatcatttcatatagtagttaaaatccggccagtgttttatcttgagtgagactcctgttactatatttaaacataaatgagctaatctgctctgagattgaagcttttttgacagtgaataaaccaaaaaaattatcctatcttttcttgcactcatatctgctacaaaatgaaacccattgttgataaaacttaagaaacttgagcttaacactccccaagaagggatcagaagaaattgcggtgactgcgaagcaaatatgcatagagaatctcattccatgtatcaggaactcctggcaaacaccagtggatgcaatctccatagtttttcggatcagctctctgttcctttgtcaagagcttccctctccgttctccatacacagtcgtatgtccatctttcctgtattccgacagttgcgtaatgttcaggaacgtgacattttctccaactctgcttagaacatcaccaacaatcttcatgatttcttgatttgatcctgtaccccaatatgatcttttgtctattggatataactcatcataacaggttccatcgctccctggattccactcccagctccttccaagatcacacaccaaaatcactctccatgtctttggaaattgaaaaggtttgctctaaaaactatctataatcttttatgttttgtgtttggaaggaacataccatagatgagtcggagacatactcgtgaagaaaactttttgcttctcggaattgatcttcgtcttaaaccacttggcccatgtttctaacgccattttataagcagtcgtcacattatactctcggacttcactggtatctccatacctgcatatgcgtataagttttccttctaagctcttctgtaatgcaagcaactcgaatatggcttatgcgttatatagcttacgttgcattgatcttaggttgatgcatccaccatacatagctctcaaagactagaacatcaaccccttcccagctcttgctatgtttttcaatggcgtcgagcttaaccaaccttttgtgtactgtatgattagttgcatgatctgaaatcgattccacgatgaaaggtgcccagtaatactcgatggatgcattgtattcctgatcaattgcataaactttagtataagaaaccatattagccttttttcttacaattcatgttgaaaatctcttctaggaagatgagttttgatgtacctcagctttgaagatcttcataggaggaatcctatggaaggacttcttcttctcaggaattactgattgcaccatacagaccattgactcgaacgtgcttctctgcactgagtctcctatgaacattagtcttttgtttctcaacacgtccaacagtttcagagcattgaacctgaaacatctcagaggttttaaacactgcgcaagtttgaatctgagatcatgaaacaacacatgctttttgtttcttaccttggcaagtcgcatgagctcggtttccatctccagttctggtaataagaatcaggccgtccatttcgttgacatgttgtttgtttgactaaataaggacagctcttctctgtataaagaggataagagacattgtcccaaacccattgtccttcaaagacattgcagctctcatcaagctgatcctctttagtgacaaacactgcctctttctgtctgaaaccatatagtttggatattcgactttctttgctcttgagttcatcaagtatccatctcacggatcctagaactagaagactaacaagcacaacttggaagatggattgaatcatcctcgaatctgcagttgtttgtatagacatttgaaacagacttctcggagtaattagctcgtttagaactacttcttgctattgagctgatgaatctatgttggatgtttgagagaagcgtatgtcttcacatacaagcataaaaaaacgactttgttccatgcaaccaccagttggtgatctttctacattaggtagcatgtcctttgttttggtgattgatctaaaaatagtgatatgatactgaaaacaacacaaatttgccaataaaggtctcgcttgggttttgaggtcaaactattctccgatctggcccagcaagactggtcgaaaatcaatgcacaaatttgaacgtaagaccaaacaaaaaaaaaccaactaagaagtacagaacaagcctgttcaattgatgacacaagcccgaaacaaaagacttatgtccacttttctatacaattaacaagaaccctaatacagtaatacagaaacaatccgatggtggaaaagaaggtaacctagctttgctattttaagagatgcaaaaaaaaaaaaaaaagttggaagttgacaccacgatggctcccacctatgctaaatactttcacaatcgtggttaattaccggtatcagattcatgtcctgagctatcactgtcagagcctgcataacgaaaagaggaatgtgagtaaacttgtttggaactgtgatgctcataagggagaagaaggtaaaccagcttcaacatttaccactagaacccgagcctgagccactactagaactgttagaactacttgatcctccaacatttacttcttgtcgaacagtagatgccacatgaccttttcaagtgtcaaaaacattaaagaagagttattgtagtggggctaaacgaccaatatagaagagcttgatactatcttaagaattaaaatttcacctaattcagtaacttttgacgattcaaggccagttactagcgtgttctgtgaagacggaagaagaaatatgatatcattagcccagtaagagttatatggtaaaagtaagagaagtgaataacaattaggtatttgctctcaccgattcgtgcacactattgtgaaaagattcagcatctctttctgagtctaatccctgttcctcctttttcttgcttaagctctccttatattcagtcacgaatctgaaaagctcccaaagtgtttccagatcaagactatcaatatctaactcaatctcatcatcttgttgagagagttctggagttctcttctttataatctgcacaactgcctctagcttgtcataaggtaaatcctggaggtcttcacttagttgccgcttctcatcaaacgtcaagtccctgtttgcagacgcctcttctacaagcttctcggggacaacaggtaaaactgcaggtttcactgggtttgtcatagattcagctctctccaaagtcctattttcaactactttaggaggaggaggaggagacagggaaggtgtaggagcgggtaacggtaacgcctctacattatgagtgtttgtcgaaacaggagcatggaaatcgatatcacggactggttgttgcttcctaataagtaactcatactgcgtttcaagaggcacccatttctcttcaaacagattcaacaaaatctcagccatatgatacacatcatgccccacaggattatacagcattgcattgttaaaagtaagtctgacatcctcagcaaactccaaaggtgacttatacaaactcttactcaacctagtcttcactgttcctaaatccataggctccttaataatattgtgataatcatgtaaaccaagcgtaactacatcaactggagtattgaaaatccatccagacttatgcttcattaacttggtaagcaaattgttgcagctcttcaaaatctgaacagtacctttatcagcagcagctccatgtactccacctttcttaccaccgtttgctgttttcagcttcttgttcggcacgggagcgaagttgttaccttgtggttcgagccgtttgatcaagctcctaacttcctcaagctcagcttgtagtttccgcttcaagttcctaacttcaagcttggaaattgagcttaaacttatcttcatcatctgatgattatcttccaacccaagcgaattcgaattcgccaccgtgggcttggatcgtttttggcttttgttgccactatcactccatttatgcttcgtcttcgaaactccaccaccagctataggaccagacgccattaccttcgttgacaatttctctgaacggaaaattttaaggtttctctagagattttacgcacagagacagtaattggggatttctgaaacaatgaatcgaagatcggggagattaggatccgtggttcatgaacattgactgtgtttgcaacgacgaaaccctaggaagcacagcgtcgcaagaatagcgtagacacacgcgcattatctcacgcgcctaaagaaacccgataaattaggggaattacacatgtgtaaagtgtgacggagtaatcacacgcctacgtgtacaaaacaaaatatcaaaccgggaaaactaattaggtgtgatatcccggtttagttacaaatctcagttggttaagagagatttgactttcaattgaatgtaaaaaccatataaaaattagctaagccatgtgcaatgtcattgagaaatgaactttgatataataactcgagaaagatccgaaatttaagcaaagaatcaacatcaatagttgcactcaattcacaaaaatcaaataaaccaaaacaatggccttcaagaaccattcttcaagaacaactctttcttcttcttcttccacttcattttcattcagattcacaacaatcattaccttagcattcatcttttgttcttcttactacattttcttctcacagtttgattactctccggtgacttcttcaccggaaaatcctcctttcgcaggagatcttcgagacctgacattcccttggaacaaactctcacttggaccaatctcggagaagctcaaactcgctgtcttctgcaagtcatggcctgttggttcgatccccggaggaatggagcgtcatgcttacacactctacacttctctcgcctcaagaggtcacgagattcacgtcttcacggtttcttccgacagaagtaaccgagaagagtactacaacaaaggagatctccatgtctactttgctccaaacgaacacggctcacttaaccactctcgagcttttgagatcttccataaaatcaacagtctagatcatcattcctttgattatgttcacactgagagtgtttctctgcctcattggcgagtcaaaatggtgcctaatggtgacatagctgtgacatggcacggaatctggtacgagattatgcattcaaatctttttcaagaactttccaatgatcgtcctagctctgatcttcaacaaacgatgcctagactcgtcgatgaaatcagattcttcccaaaatataaacagcatatttgcattagcaacagcgcgcgcgaggtactagttaacatctatcaacttcctaagagaaaagttcacgttatagtcaacggtgttgaccaaaccaagttcgtgtattctcctgaatctggagctaggttcagggcgaaacacggtattcctgacaatgggacatatattgtgatgggtgtgtctggacgtttggtgagagacaaaggacatccacttctatatgaagcgtttgctttgctcgttaaaatgcacccgaaagtctatttgcttgtggctggatctggtccttggggcaaaagatacgcggaattaggcgaaaacgttagggttttaggagctttagagccagaggagctctctggtttctacaacgctttagatgtgtttgtgaatccgacgttgagaccacaggggcttgatttgacgatcattgaggcgatgcagtgtgggaaacctgtcgtggcacctaattatccaagcattgttgggacagtggttgtggacgagcgttttgggtacacattttctccaaacgtgagatctcttgttgagactttggattctgttgtaagagatgggcctagggttttggagatgaaaggaatagcttgtaagggatacgctctttcgatgtttacagcgactcaaatggcttcggcttatgagagattctttatgtgtatgaaaaatgagaggtactgtaggtaccctctttccacagataactgatttggtaaattggtatagttttgtaagttacgttgaatcatttcttttgtaacaagttacttgatctcttgcaaaacaatttggtcacactattcatacacatacttaagctcaagcttgtcacgacttgtaactttttgtgaatttgtaacgaaagtgatgaaaaagagattttggaaaatgagtttcgtaaagagcagcatttcaagggtttgatctctgaaaaattgaagatttgaagacgttgcttcgctcttaaaaagtataattctctctgttttcccctgttttttttttctttttgaaaaacttcaatcactatcgttctctctttatgtgatatttcattggtggacgatgaggcaaaagagtccatatataatatatacttttctacacgagccattagagactgaaaaaacaggataaattaaattaattcaatcctcccttatcatactatatttctttaccctttcttgttatataacaatttatatgcaaagtcctcctctctactagactactatatagtggaatgtataaggtacgtaaagcatgcacaaatcataaatgtgtaacgaaacagatacatcaatatattggttacaccgaacgaacaaacaaggcaaaaaaaacaaacaaagaggatcgatatgttttcttctaaaccggttctcgatcaagaacaaaatatacatcctcgaattcaaaactacgagaataagacttagtgatggcgaggatcgggacctccaggactgagtctcatggactcattaaaacctctctccattagcttctccatactcgctttcaacacttcctctgcttctatcatcatacgccctcgtttaatcccgtctgcgtttgggaacatcggtcgagacgctgatgaacgcgataaggaaacgcagatcaagaacaagcacagcaagaatttcaagttagccatgtgttatgtgacaatggtttcaatttagaaaggtgttagtttaattttagctagaaaaatggtatagatgggttgttgtgttttttcatcacatggttgcgacaatttatatagagaatggcattgggatcatgatgaatctcattgaaatgataacttattggctggctatacattataaaatagataaggcaaagagaaaaaaaaaactaaggcggtcgtggaaggagatttataattgacgagatttaaacttctccaaagtgctcattcgagatcagcatacatattccttttgtcaacgtttcatgatataaatatatatcaaagtaagctatcaatatttatatacatctgtgtgtatgagtgtggtaagcagaaaaacctatacgaagtatgaaaacctttttagaataatgcgaatgatttcattatcaaacgtagatgtatattcatgctttcataggatatacccacaaaggaaaatttcaagaaaaaagtgaagtgttgaggatgacatgtgttagtaggggaagaaaagattgtaattagagtgcatttgaacgataaaccaactaaaacaagtccataatataaaaaaggcatatatgggggacaaatgtgaatgggctcaatttttatatattgtcgtagctagaagtcaataagaccaacgtggaagacttttgccgcctttttttggggttggcctttagcttatctagttgaccatctgagttaactaacgtaactccgaagcaaaggatctgagtaatgtctttgattgaatttggattctattaacatgaaaataatcgaagcaaccatatatgaatctctctatactaagtgatattgaaatttcaaattaaaaagaaaaactaggagaagatttatgagttgaggtccaaatcactatctctctcttttttttccctgtaaaattaaatatggagagtataggacaaagttaatcacgctattttatattcgttaataaagttgaaaactctttatgatatagaatttgtattaacgggaactattttggattttgtggatacaaatgtggcacattagttttatagactaattaagtgaaacaccaattcgaagctcgtagaaaaagtgaatacaacactaacttcaacccacctattaaagagagcttattatcaagaatatatataaaaaaaactatgacagaaatacctaatttttgagattacaaaagattcttacaaaatatatatgttagattggatttacaagaatcttagattgtacagtcgagatacgaattgtatagtattagtttagaatactctattgttttttgattgagtaatgaaacaactcatggagtttaccaaattacaaaatgtgtaaggaaaaatgtgatgaaaaagatggaagttcattggatgctaagacattaacccatcattcattcatctaaacattcgttctttaaaacattcctctacctacaccgctctacatgccgaaagcaatatacaaaacttgatggacctaaaatgtcatcgttcaacaacatatgcattatgcatattacaaattatgatggtaaataaataaacgttattgtctacttatttaacatttgaacgtattttctgttactaatacaaattcagttaccttgttctagctaataatatgaataattcccgctgacaaaaatgaatatgatcattttttaatacatggtgaggcatgtgctctaaatagccaccggcattgtctataattgtgttcgtcaatagaataaacatatccatttctttatggttcgttcgtggaccagaaaaatcatttttctttataggtttttggaacatattaaccattacgtcatttgataaaatttgaaacactttgccagtttggaccagtatctcatgaaacaccacgatattaaaaattggaacgatttacaccgcataaggatataatctaccggagaagtaacatactcaagaaaacaaattgaatgtgtgtacaaacctatcgttcattcaacaaaatggtacataatttgggatatagaaaatctgcgtgtaataaaagcactagtaaagtgtatagatagtcggtcttctcagggttgttaaggtatcgctaactacctcccacagtggtcctctggacggcactttcttattttatctaaactttttcttccattcaactcgaaaatataaataaattaataacatttctattcctgtctagtgttatatgcttatatatcaattatcttttgaattaaataacaatcataggattaaaatggatcatgatctctgaaaaggagataaagataagttaaagaaatttctaatgacggttagatatgcatagagtcactcaggtcacacaacttcattacccccatcctttttaaaggatctgcaagaaacaaaatcaatcaaagtgtttgatttgctgtaaagtcaactatattttttaagagtatgatatttctaaatttaacatgaataattgatttatgctatgaaaataagcgagttttccaagaacttttaagaacaaaattagttggaagtcaaattccgacgagctaagcgtttttagtgaaaattaggcatctacaaaatttcgagactagtttgagtttcaattcataaattacccaattcattttttttttcagttgacatttttttcttttttttgacttttctcattcacaaaagtgtatctgtaacaatgtatgaacaaataaaactaatcaggcaatagaggtaacctatcgatgccagagggtgagtcattagactcgccggtggcgaaacctaactcgtcaagctcttccccgttcgcttctccaaactctccttcatcttcacggtcgtctctatcttcttccgtgctataagggagaatccgtagatacatctcatcccctctccattttctttctgatcgtaaattatacttcctgactagctttccttgaagagacacaatcctaggtggcctcgggagtaaatcggttgtttcctttttcggtatcactatccgctctatcgctaatctcgcttcctgcatataaacaaatcaatgttaagcaatagtgaactgtggtactatcaaagaatttttttgactagctctttagttacttctaaggcgtccattttttcagatagttttagacgatcttctgatccaaactctccgagtccgtcttcgtaatctgttagtaatgcccgtatcgccttggccacttggatacctgagttagtctgcaagaaaaagtgcttcttttggtaaggaagctgatactaaaaaccttgaagaacaagacattcttagttatttttttacctttgttacataaacaggtataccgtgagatgtagcaaatgatttaatccggggattcttcctgatctttgcttgcaacgcgagtaaggcttctgcttcactaatgtcgtcagttaactctaccgcagtttccatctctagttgtttgattgcctgaagaacagttgattctgcaatctgggtgggagaaattgacgaataagtgtattaatattggaaattaacagagatagcatcagactattaaaaactggagaatctgcaaaagtcattataattttaccccatagacatatagatacatcaatgtatctttctctgaagattctgcttcagttatctccttagtttgaaggacttcagagacagtttcctccttggtgagcttcgaaacatctaatgtttcctcttcatgtttcttatccacagtcttctcgtcgatgaaaggttccttctccataatcacttccactccatgagactttattttgcggatttcaacgtttggtaagcgaccttttagccaggggatgagccaaaagaaaaaagttcactgaagccagaatcttaaaatgttgttgaatcaaaatatatgctgcatttatgtatctgtactttgcatctactaacagttccaacttaaaaaagacagaatctacctgcgaggatagcatcaacagttgcttcaagactacgatgaactcgaacttcagtctttgaaactatttctgcaccacagttaaatgttgaaggaccttttctttcaaggacagtcttctggccacctcttctggtcgcttcctcatctccaagagttacactctgccaaaaagtctccatcaatatgtctgaaataaaagttattatagaatgcatctttacagggctgaacaacgagtcaacagaaaatattttgtccaaaaacattgaccatttgagctaccacaacatgatctcactcaattcaaatcttctacgcagttcctgtgcctcgtcatctcttgtttagctaatatatcaagatgcacgtgcggaaacggaaacatatctcctaaaccaatttttggataagaaatgcagtgctatgttggcattgaattatgctagaataacaatttgcaagagattctcatcaaaataatgtcaaactagaatctccaaactacgaccaatcttgggattgaacggtatgcaaacatatgatgactaacctgtacacctccaaccagaaggtctaatgaaggattcttaatcaaattctcgatagtggctccatgagcagtggcgactaactggattccacgttctgctatagtacttgcagctatcgcttcaagtttagttccaatctcatcaatcacaattacttggggcatatggttttctactgcctcaatcagcacctgaaggtaagtaaagtgaaacacatataaaccatctccaaccacacttaaatacacaaagctcaatctaaactactaaccaaccttgtgttgtatgtcagagttagggacttgcatccgcctagcattaccgatccctggatgaggtatatcaccatcaccaccaatctcattggaagtatcaacaatcattactctcttctcatagtcatttcctagcattcgtgctacctccctgaaatagcaaaatgatgactacatatcaaatccatgatctaaaggaactatgagcaagcagatcaatgtaggaagaaactaacacaaacctaatcattgtagttttccccacacctggaggaccaataagcaacaatgagttcccatcttgaacaagatcacgcagcaaattagcgcttcctctaacagatcgaccaacacggcaagttaatccaataatttctcctttccgattccttatcgcactaatccgatgcaacgtccggctgattccagctcgattatcattagtaaactcaccaacctgagcagtttcatggtcttattaagcatctattatatagatgtttcatcagacgaaaatatcaccagagaagaacacttaccaacctgagaaacagcgaattc

SEQ ID NO: 134 - DNA, 115721 bp, Arabidopsis thaliana
gaattcggatccatgatcctaagctcgctagggcaaatctcgttgatgtccgagacgcagcctgcgtatttgcaatttccgaatcctccctgtggttttatccccatctttacattgtaaccgtcgacgaggctcacgtcgtagaaatccatgccggcattgcttgatcccacggtgaattccgctagagtcgctggaggaactccgccgccggtacattttaaaacgccgccgcagtctccggtgacgcaggtaccgtgaccggaggcgtcaaagttgcagccggtacgagcccagaaccggcctgaccaaccggtaggagccgtgagctgcacggaagcgcctggagttaagggaaatccgccgtcgccgagggtgatgctgttgccggagagagttcccggccaaacggtgtacgcacaactgttttgtaaagtgaatacggtggcggaatcagcaatgccacctgcaatttcaaaaacagttaaatacaaccaaaaaacctaaatgcataagtgaaacagagaagaaacaaaaacagagtgtgctttgttgttggttacttgtgatgaagacgaagaagagaatgtgaatactggagattttcgccattattaaaaaccggattttgtgtttatgtgatgtggatgatgatgaatctctggcaccgattctctatttataagtgctggagactcagaggtttaaagttagggttatcaacttcaattaattataattttctgtgcctactctgttagcccattttctttgtcagtgtaacatttatttgccttgatgattttttttttcttgcgttaataaaaagaagattatgtctcatagttatcgattacaattgtacatgtgtctttgtgtggttagatatagaattacaattctacatgagcttgtattgtcctaagagaaatgtatcaatagacattgttttgttttgtgcctctcaaatctttcccaaccaaaaaagtaaagaaagttcatgaaagttggtttagtcaaaactaacctgagctcatctgcacctactcatataaagagataagatgacacgtggacaagttatagatatgcatataaagaaaacaggagatgctatgctctacctgaaaaagatgatccaatgtatcagtgaaagggtgctgagcaacggccttcttactctctttttcatcacctgcaaaaagaaggtaacattcttttgggacaaagtgggttctactatgctttgtcgatcaccgacaaagttttgctcagatggaaacttcctttacttgactgattcagaagtaagaacaccttttgacaagatggtttagtgacctgttgttgtttctaactcaataaacacaagagttctacagttccaacatatcaacttttccttccaaattctgtttgctccgtgacagttttgaatgaaaagtgctaacagtggcacttgcaagactcaaacaatttgacataaccaaaatgtgactaaagactacacaaactatctatgtgagtttcaactttcaagagaacaacatggaatacaattttaactaactgaagatcaaagaacttacaatgaaaaaggcatcccagagatattttctgcctgtaatattatttctttgtatacaaagaaagaattgtatttacaacaaagttaatggtttttaactttacaagaatcttctctaaaacagccaggtgagggttggaacttgtaatatgtagcaaaagttaaatatgtgccgcttagacaagcatatactttgaaacagctatgtgaatacaaggtcagatatatgaacactactgtcaaagatattacccctgcaaatgttgcaatgcacttgagaacagagagttcttcttctggtctttgattggggaatttcccctgagcattgaaatcggatagcagtttgtccttcaacttaaatgaatccattaaccaagcagaagattctgcctcgtttgctggaatctcctttagtagaactcgccgaacgtggatatgtacttctgaaggatccgtcccgaatacattgtccatgaaagatgggcagcgaggtttatatgcgatagtcaaatcatatactgcattgcaataaaaggaaatgccttgttcagttaattgtggtcatgaggtcccacatgggtcattggaaaaatagaagatatgcacgccatcataatgtcgtcaaaacacataagtgtttgcataacatgtggcttgagatactactatatgtacaccaacatttgtaacaaaatttcatgaaccatacctgcatccaaagagttatgaagaacttctaagcaaacgccaaaaccccttgtttttggtagaagtacgtttgatagtgctggaagaccaacttcagctgcaaacttttggcttctcttgcatttctcttcactgcatatcaaataaggaaggtctcagtaatagaaagaagatatactaagagcagcatttcaaacattcatgcaatagcaggcaaattattgtaaatgagggtgactggtttaagatatttgcaagacagatgcgcatggtgttaaatatcctaccaaagagaaactgaaagatatcttcgaagattcagattaataatgtattagctaatatatctagagcagttaaatcagatagggagcatatagtacgtgaaatcggttccttcagggaatagagcaagccataagggttcttgaggatccttaaaagatgaaagcatttgaagcaaaacaggttcgtcgacctcccgcttcctctccaccgggataaattccaaaacatgaaagccccaaccaaaaataggtaatttcatcaagctgctcttgagcacgtatttgatgtagccaagacagccttttctcaaggcaatattccacagatacatccaatccacctccgtcctgtgatttgcaataagcaaaacacgtttctcaaccggaatgatgtctccagagaacaccacagttgtcccgttaaccgtttcaaacaggtaaggccacaaagctaaccagagaccaaagattaacgaaacaacttttctagattgttgcacactcagaagccgtagacctagagcagctattggtgcaaagtacagcagaaacataaaagcagtagacagaaacaccagcaggatcatcaagcccctcagaatcctaagcggagtcaaggggcggttctttaagttatcagatttcagatccccgcaaacttccatcttttttccagataaacctcaagacaaaactgcagcaatgagattcaaatattactcagtgccacctttaagttccccacaaagattgagtttttttctttttttggtaaatacaaagactcagttgcagaaaagatactataaaaaaccaatgcaagaacctaaatatatgcaatttgagtatcaataccaaacaattaatctaacagtagacatagagattagagattcctaatcaacacagccatgaatgaagaatatataaaaagccattttttcttacataagtgggaaaaaggttgcaaatttgaatctcaggaacatgaattaagctctaaaagcaacaatgaacagagaattccttatctatgagctcagtggaagattcaacaagcgaataatgagaaaagattcgtcatttagttagtatctaaagctgcataatttcgaatctataatcatcaatattccaaaacaaaaacacagaaatcacggagacaaaacatcctcaaattgggaaagacttgtgaataccgcaactaaaaaatcagatcccacgtgatataagatcaaagaagagacagagcaagagaaacacttctctcacgtatcttcgaaaaaagcaaaaacaatctaaagcacgaggaactcgacgaagtacctggagaagtatgaagaaacggaagaagttggcgaagacaaaagaggataattgttaaatggtggaagaacagaggaatgcgaatctcaaacgaagtttcagagaaggatacgtttcgggtcggatctaattaagacagtggggatgatcagagacggtagggtgcaccgtactatagcgatctgattcgctgagtgcgaaaaggtcaaaagttgcagggaagacaaaatccacaaaggtgacacttgcgacccgataaaattctcctggcgtcgttacactttttgtgaaactcaaacgtgaagcaaactctaattaatacttttccccacttattattattggttgtaccaaacaagaataaaatctagcttttaatgatttatattttttaatttaatacattgagcttgatattttttcataaattttggatctgaagtattaatatacgagtttcatggggaccagatgtttttattaattatttcgatgtcatttatttttatttttacaatagtataagtttttttttggaatttttgaccaaattcccttatttttacaatggtataagtatattttcttctaagataaagttatatccaaaaaaatataacaattcatgtataaaatgctgaagaaaaaatcgtgtctagttgattttttctaagtaaaatttttccttgaaattgttttctctagttgttgttaagaaagaactgtttgtttagtgaatatattggactcattattgtagaagactaagataagttctttctttattataatgaaacaatttgattataaaatatatcattgaccaagaaagtaaactattaaaagtgatagtagaccaaatatgaggatgtgattgatcggttcaaaagttaatctccgccaccgattcgtcaacttacagtaggggtacataagcaataaaaacaaatatgaggtcaaaactaaaataagtagtaatataagggttaatgaataaataatcagttcacggtgccggcgaacttgatatttttctcactcttccctcttctgcttcagaattatcgggagaacttcagacatgctatgctccgaccgaatctcatcatctatcaatttcatgtgacttattaaattgttctgtattctaagaagtggttccgtagaagcggagcaatgccgatttctatggaacttccagttttctctactctccgagtaccattgttctctcgtttagctttacttcctacttttggagttccgttttcgtcccttggtgctacgacgcgattgaactgtacatctcgaaaggcgcgtcggatttgcgtgatgtgcttagtgagggattctgctccgatagagacgtgcgagagagctggagaagatgggtctgacgagttcattgaggttcttgtcatcggtagtcgcaaggagtctatcatggattcatgcttggattctccttttccttctcttcctctgcgattttggtatatgctcgacttttgttcggcccatgattctgttttatctactagccactttgttgtagtctaattttcgaaatctgatagtttattgttactgactttcctagcacactcctaaattgtgtagctttcttctagtgacgaagcttatggcttgaattgattacgtacgctctgtgtattcgtgaaagggatcaaatttaattgccaaatctactttttcaggagtattagcaaggacagctctggaggtttagtgttacagcagaggctcaatcaccaaggtccataatctattcttttcctgtttcttcttgccgtttgagttttgaatttgattaaaaacagattcttgaacaactagcatatatttagctagttgttcaagaagattagagggatatgctatctttcttacttatcgcttctctctttctgtttacagataatgccttgaagaccatgaatccaattgagctgttacagtcacgtccaagggccttcatccttgtttgtacttttctcgcctaacattgtttgtgttctgttttctgctacaaaaacgtttttgaatttcgcagttccataggtagcaaaagatacacagtgtctaattgatcagtgattattaacaaccatggttccgaaattcgcttaggctcttaatgaaatgctaatggttttcaatttttctcgaattttattttcgtggaatagtattggccgagcatctgattctgcttaaactgttacccttgccaggtggctagtgctggatatggttctgaccaggttgaagctattaatattcttagtgcagtaagatctgggggtaacttagctgttgctgtgctattaaagcctttcagctttgaaggccgaaagcgtctagaagaggtagttttttgttgcttctaaagttgtagttgattgctatgtaccaaaagagccaatttggactttcattttatcatcccagagtcttgataataagattaaagcagttagttacgtgtttggacttttttattggtgctgtaagtagaacttgtatacctgaattgatagagaagaaaactaggtggagaaccttcgagtggcttcatgtttttccaacaacacaccttcccaaatctctgtcatctccatttcttgtcaacattttttaatatatacagtattccatataacaaactgaaaacagcccagtaaatgacgtccctatctacagacaagttcaacttcatttagtattgctagttagagccttttctctttttctaatttcccaggttgtgtgcaggttaacgagttggctagaaaactgcagcaacacaccaatttctgtataggtacgtctattaacattgtgaaatatttcctgacacaatagcgtcagaaaaattaccttttcttctagtagttctgctggccatgaactgactttaatttgggcgttgtagatatcgacatagaggttttactacagaaggatttggtaactttggacgaggcgctgagaaatgcaaacaatgctgtgtctatggcaataaatgcagcttccgctctgataagtgtaaggttacttttctgctctagctgtctctcatattatactcaattttttttgtcatttcatacatgggtttatctaggggatgcatggaaacttcatcgatgtgatgcataaagatcttaaagaacttgaaggttcagaagttaaaacggtaagtttcttggaattgtttcttttgggttttagtagtaaaaatcttcatagtcttacctattcttgagatttcatttgtctgtatggtatagtcacccttagtttcagcttgtcttcaatccttcaactctcttatgtacagattctagaaagttacaaagaggcaaaggttggttttggagttggtcacaaccttaagacttcgatattacgagctatatatgactgcccattctttcgacctggtctaaaggtatttctaatctgttaaagagctttcgacagaagattcatctgcctacttaagttcttcgtttgattttttcctcattcgtctgataataaagtgaatataaaaacattaattcgaggatttgataattggaaaaaataaatctaaacatagtgacttataaaaaaccggtaaaacagatggtatcactctcccaaaggagcaagggtatttgaaatttttgtttgtgtgtattttggcatttttctcgaatgatatgctccttgaaataattcttacgaaattatgttattcaaagtaacctttttcttctcaagtctcaaccatgcttttaccaacatgcaggatctaaacgctattatatgcattgtggctagttcggtacctctccagaagaaagacgtgaaaacaattcttcgtactttccgtcaaactatggagtacactggagatattatagtatctactgttcatgagcctgatctggagcctaaagtgcgtgtcacaacgttttttattctaaggtgtgtcttcatgtttagtgacagctaacaatttcaagctcatgcatatggtatcatatttagctgaaaatcaacaaagaaaagtaaatatatggtttcagcatttataccatatatttttatgtgtttgattaagatctatgatgcttttgaccaagactcagattctatttctcgtgaccacttttaagcattaatgctagtctcaaatgtcatcacagttcttcagaagtggaaacatccaacaaaggcaacattttttctggtcttgttccttttgttttaaatatcttcacgagatatcgttcacagctccaaaaagaaacaaatattggacttggagagacgccagtttcaattaaagattcagcagactctactgacgtaaaaacttccaatcagaatattgaggaatttgaaattgactctgaggacctcctggaagtttctgagaacggtgatgatagtgaatacccattaaaagagggggaaccatccagaaacagtcgtctggatcttaaagatgaaaatgtagaaggtacaaaattgaagacaactttctgttgctgcttatttttgtatgttgtattggtcgagatgctttattacttgttatttatagggtgctgaagtagtgacgccctaaactactttaaaagtgattaagtgaatgaaagtcatcttttgtagattttggtgctatccagagggagcctattgccaattggagtatggatcagggatatcagattgagcagaaatggcaagctgattctggagacactgcagtgcttagcctgggaattgtcaaccttcctgttggtgtgagaccttcgaagaaattgaacagtaatctcagtgttgccagtcaactctctaggaaggctgattccagagaagaatcatttttcaaccctaatggctcgacaaaagactctagtgatactgcatctaccctgctatctgagaaatatgctgattttacaaagcaaagaaatctatccgctcgagcatcgtctatgctggtaagtagcaatgtaccagcttatgaggttgagatatcaatcatcttcttactagtgggctgctttttcaaacaataatgcatatagaggcaaagttttctccttggttcagtctgcaaccatgatgaagagtctttctgtaaaaacatcgtccaagtcgatgccaactgagagaaaattttccatttttaattcttaggaagctgaacgagattcatcaaaaagatggagtcctattcttgagatgcagtacagaggaggacttttcaagggaagatgccaaggaggccttcccgaaggaaaggtaatctgtcttgttagttttattcattgaaaccaattcatccatggatcctcttcttatgtttgagacagacttcttagttaatccgaaagtaacagctgactattcccaccagggtcgtttggtacttggagatggaagcatatatgatggaatgtggcacaacggtaaaagatctggtctcggaacattctacttcaagaatggagacgtgttccaaggcacatggagagaagatttaatacacggaaaggtgaaatagtcttttgaccttttcgaattttgattagcttattgagactacacttttgcaccaactgcttagtttcaccaccaagtccctaagactttgtcaagctggtgccatttaaaatgcgtttcctacttccccaatatatcgaataggtttgataaaggactgtacaaatatatctcttattagaaaaacaaaacttgttcatttgtcttgcagggttggttttatttccacaaaggtgatcgatggtttgcaaatttctggaaaggaaaagccagtggcgaaggccggttctattcaaagtccggtgagatattctttggacatttcaaagatggttggcgccacggacaattcctctgtatagatttggatggaacaaggtcagtgactcttaaaaaaaacttttccctatcttaatcagaaaaggagcaaccccaagtttattcaaaattgttgacggctatttcctacagatactctgaaacttgggacgacggtgttctcattgaccggaaacaagtggacgccggagattgatatcatccggcaatgctgtaactatatagtgcatatcgattttgtcttttctcaggttattattatgacaaaacgtgattcataaaaagtattcctgtgacttaaaaactccttttctttgattagatgtttaaaagaaacgaattcaataccgaaagctacctgactttttctttccttgcaacctgagaaaagtgacgaatcttcaaaagatcaaaataagctattataatgcaaaattatataatatattttgtgtcggagagcaagactacaatgattcctattcctaattatcatacaacaacaacatcaacagaataaatctgatctccagttttcatattttagctgaagtctgattttttttttccggatgatttcaataatacaaaaatgattaaggtttatgtggtgttgtgattagccttggtcatcattgaacgcgtcttgcaataaaacttcaagtagagcaacgtgataacggcgttaagaacagagttaaacaaccaagcaccgataccgttacaaccgccgcgtttgaccaggtgtatacagagtacgcctacgtggcaaaccgtcatacaccctaacagaatggcttgacagtttccgacaaacggaaaacacgcgccacgcaacccaatctccgtccagaacctgtaaccgtacacaacggcgtacgaaacggtcgttaatagtatcgctaccacctacagaaaccaaaaccaggaagaacggttcaaatttataaattcggtaattgattccggtttaatgtgtggtaacccggttattttatacctgaaaggattgggaatattcgagccagaggaaggagatacagagaagagaagactggttgataagctggaagaagctgagtttacgacgtcgtatcacggagaagaaagtacggaacaagtgaaggaatcttgagaggtaaaacgcgtatgaccagaagaacacgcgtcccgaagcgcgtgtacctacgggaaagcagaggaaccattggagagcagtggtgcgggtgcgacgccatagccaccgcgtgtctctgatctctgctgcggcggagaggaggataccgacgaatatgacggcggagattatggaaatggttaagctgtgtagagctgggattggaccgagggagaatccgcggcggcggttagagagggagagggttatgaggaggaggaggtggagagtgacggcggcgatgatgtaagatgagacggcggtgaagaggaaagaccacgtggaggcgtaggattgggttggactccaacggaagttaacgatcgttggatgctccgctaaatagtaattgaacgtcgtcattggtaacaaatcaagatcacagtggttgtgttgtgtgatgtgaaagaaaaaggaagaagaagaagccgctgagagaatgagaggaggagaagagagagattcttgaatgtgagtcttctttaatttatgttctgtttctgtgtttcttgttttttctcaccggctttgctctatttttatactactgttttcgtatttcctcatttttttttgtgttagtaaattgggaatgcgatccattcatgtcatggtcaaagttgacatgtataagaagagattaaggatgtttatgataactttatttcatcaaataatttcattaaaccatcgttttcgagttatcgttttgtaattaaaaaaaaaacatcatttcatacttttagtgtattttttcaaaactaaggaagtgtattcaatctaccatttaaaatgatttgtgttaaaacaaaatattatgttattcaaccatagagttttaaaaagttataaaatatagtaatatagaacaattgatttggtaaaaaaaactttaaaattcattgtgattggaaatattttaagcattagatttttagtgactttaagagattacaaaggatttcttagttaattatgtgttttaatatagtttaaaattgtagattaaataacatttttctgatacaatattcaaatccccaatcttttaacaatttacgtgacttgacttttcgtgcagagtgagaatatgatacgattgtttttgttctttttatggtaaggataatgaaagttgcttagccgcattgcgtacaagaaataaatgcaaatgcaacaagactttatacccaactataatacttccagaatccatgtatattattatttggacttcagcacaaattatatgtgaagcaagttaatccaccacgtatgatatttgttggatcatgttccatttcgaacattcctatagttccagtcaatttgattcgttgtactaagtatttgataatattaataataccgtcgtctagaacaattttaaagttaccattatatattaaggtcctaaaatatttatctgaagatgaagtcttaaccgttacactaaaaagcattttatacgtgtaaaaaggtttaagtttcattctataaaaaaactatattaattgagtgcgttttcttttctgaattatttttgttgttgatatgtttaaaatcgtaaactaatcaccacaattgttacaacaataaaaatcacaaatatatagactggtatttttctagatgtaataggatttgatctctaactttatctaaattattttattcataatatataattactagattttaacctgcgatataccgcgggactatttattttttaaaggtaatatatattaaaacttacaaattttatttttataaaatatttatattttacagtttataattgttattaagtaacgctataccacgaatccatgagacaattgttaaaaaactgaagttttaacccttcttaaaacagtatattaataatattttaaaattttataaatattgattcaaatacatccaccatataacccaattccaaaataaaacccgttctgtaatttctttacctgtcccgtgattttttttaaagtagtaatttttaaaatttaagaattatttattatatataagagttttataaattgcatcattctctaatacatttatattttatagtttaattttatatatagtaacattatacataccacataattttttggttttatataaccttttctaaattaggatgatttgatatgtttaatattagtggtcttaaaaaataataaattaaagatttaacccgtattgtgaattaattatattttacctttttattattgttgattcaaaaccccatttctccaaatctgtcttgccaaaaagccatttatttaataatattaattttatttatgatatgactctaattataatctaaatattttagctaataacataggagtgcaccatatttatttaataggagaatgtaccatatgacccgaatgcacttttaccaaaatccaccaaaaagtcttgcaaaaatactatagagataagaaacgatagtcggttttgataggtataagattaacaaatatattaattagcttaaattagttaaagagtacaaattgaaaagttatattacactttattcgaatatattatcaaaacttatataacagagagatttgataaaattgtaattgttgaatactttttttttgtgctaatttttatgtaattaagatttaattgatttcgtatataaaatattaaattgttttacgaacttatttgtttatatttggtaagagataaatatttgaatattcggtatattttgattcagtttagaaaatctttgatgacccgtctttagatccaataagccctataattaagaaatgaatattgtcgttaaatgaattttggtaaccttaataacgtcattaaaagattttgtttttgattaaatttttctaatatcattgtcatgtaattaattacaaaaattaaggttacatttcaaatgtactttccaaaataatataataggatttctttgggtacaaggtgaccaatgatcatctagaatcccgcaaccgtcaaaatcacaagttttagcgtaaacagtttatggattgtttgactttaataattggacaaatgttgtaaacaataatcactactacgtgttttaacgttaggttgggcatttttcaagtaacaatgaaactaatttatttattttggtagggataaaacaaaatttaatgcaatgttcaatatgtattagtattgtttttgatcgagtactaaaattctgtaattcgttcacttaatttaaaggtatagaatcataaaacgataattatttttggtaaacaaaactattagtcaaaagtcaaaactgacatttaatttgaattgaaaccaaggaaataaactaattttatttaaattatgttattaaatctttaaaaatcatctgataattacatgaaggaagcttggtcagccataagaagaataacaacttttttccttttttttttgttttgttaatccgttagtatataaacaacagtattcctagtttctttcaccgactcttctaatctctgcgatcgtacatcagaaacctctatctcatcgccgaggtaaatctttcagacgctgtcccttctcgtaaaaatcgaaactttgaatcaaatctacgtgaaatttttgtatttctctgcatgtttgatcaattctatatgaaaccgcgtttaagggttttagagtttttcatctcattcgttaatttcattgcatgtgtgcaggaaaaaagatcttacaatggctattaacaccatcacgaacgaagaagatgatgcatcaaacaactttggatgcaatatctgtcttgaattggcaagagaaccgatcgtgactctatgtggtcatttgttctgttggccttgtctctacaagtggctccattaccattctaaatcaaatcattgtcctgtttgtaaagctttggttaaggaagatactttggttcctttgtatggaatgggtaagccatcttctgatccgagatcgaaactcaatagtggtgttactgtccctaatcgaccagctgcgactaggactgaaacagctcgacctcgtcttgaacaaagacatcatgggtctagtttctttggtgggcattcaagttttgctgccatgccaactggtttacggttttcaaatttcttgttgtaatggaaagtatcttttgatgaatctgagtctgtttttttgacaatgtttttgaaactattattatacattgtctacgatttttgttattttgacaattaatgtttagagctacttttacattcttataaaaaatttgcatctgcttgtaatatttgattctccaatcttccgctttgtgaaaaatcgtcataagcttgttctcgtgctacatctgcagattgatcaacatgaatgctgattatagtatatgatccttaatatatgattatcgcacagatgaatttaaagcttcacatttaatcgtgtaatttggagtagatggcaaaagaacatggaaattaactaaatgacaatgatgtgatgtaaatttttgttttgaccattttgtttttgttaacatatgtaacgaatctacacagagtatttgtgttttcaagctccttgttaagcccaatgaaggtttttaatgggctctaatgggccgattcaataagttggaaagctcatgaagcgagagggaccgtgcctaatctcatcttcactctgctcgttatcttcttcctttttacctgttcaacgaaactcctgagctcagcttcactttgctcgacgttatcttcttcgttcagcgacaatggcgtcgattacgaacctcgcctcttctctctcttcactctcgttctcctcccaagtttctcaaagacctaacaccatttccttcccccgcgcgaattcagtattcgcattaccggcgaaatccgcacgccgcgcttctctatctatcaccgccacggtatctgctccaccggaggaggaggagatagttgaactgaagaaatacgtcaaatcgaggcttcccggaggatttgctgctcagaagattattggcactggacgacgtaagtgcgcaatcgctagagttgttcttcaggaaggtactgggaaggttatcatcaactatcgtgatgccaaggtaaatttatttctaatttcattatcttattggcttttacactgttgcttagtcgcttgatgtgtttgcttaggccttgaatttggagtttatacagctgagaattgactactcatatgagattaagatttgaacttgaaattggtattttaacagctaaagctatgaaagcagtccacttacccccgtttgaacatattcttggtttatatgaatatctgatacctgcaagagactgacatcatgcatagtgtgtaatcgattgaagcatttagtagtataaattgtagcagtttgtaggagagaaagtcttgacctttatgaagatattctctgttatgtagggtatactagtcttgtgatcaaactgtatctttatgtacttctttttgatagatgagttatatcagcgcgttacagattaagttgaaactggaagaactctctgaacaaatagtttatatgatgaattctaggctatttagactttagactaggataagtggctgagaaagtgatcaaactgtatcggtattagtcttgtgatcagacgttatctgtatgtagttctttgtgacctgggagctgcatcagcacgttatagattaaggtgaaactggaagaaatttctgaacaaatagttcatatgataaattctaggctgtttagacttaggataagtggctgagaaagtgttaacaaggagagattatgataaaagtttggggggttttgacaagctgttttgttgtgaatgggaaagatttgaatccatacgtatattgctgatgatgatcattgtaaacctttttcaggagtaccttcagggaaatccattgtggcttcagtatgttaaagtaccattggtgactttaggatatgagaatagctacgacatatttgtgaaagcccatggaggcggtctctcaggtcaagctcaagcaattaccttgggagtcgcacgtgcactcctgaaggtaagtgcagaccacagatcgcctttgaagaaggaaggtttgctcactagagatgcgagagtggttgaaagaaagaaggccgggctcaagaaggcgcgtaaagccccacaattctccaagcgttaagagttttacatatcattggatcaactcttcaagtagactcctctgcctccattttttttaaaaacttttcttgtctattatcggtcttttgtttcatgttaatgtttatgtgtagacgaactaatacaatctctgttttgtttgaatggaacgcaaagttgatatgcttttgtaacaaatgcacttatgaattgtgatcagacaaatgcacttctgaatcgtttatcagttagatttcaggtgaaagtgaaaactttgcttctttcaaaaggtgttcatggatagtggataagcagcaatacctgaacacacttgtatcactttgtgtatctatctaattcctttgatattgaagtagtaatgttgattttgatgggctcataccgaacgaatcagaaatcgacaagtgtgagatagtatgtatgtgtgcataaaataggctggtttagctgggaatggtgatgcgaaaatggaatgttaggtatgagagagcttacccactttgactctttccatgcatattcgcttgctcccctctttcctgcttcctctgttttcttttattccatttccatcacttaaaaacaaaacaaaaaacctgaactcttgggttggatttcaaaccaacataaaccaattctctaatacaacttggtttgatacaatattagagctacttgatgtgtgtaatgtttcgatcagtaggaaaaacaaatcacgtgtatcctatcaaacttttgattatacacaagtcaaaagagacattcattgtgtgaatttaatgaatttgaggggtctattatatttattagtcagctttaacgtatcaaatccatgacttttatcaatgttttttcttcttttctttctggatctacttcccaataccatcaccggaccggaccacttgatgatcttcctatttatgaacactactactagtaaactcatgtataaaatacgtactttatacgtgtatttctgaagattagtcacttcaaaaaatcatgagagtaataaatgttaaaaaaaaaaacagtggcgctcctttgccatatcactatcccaagtctgtaacacttcactgccacaaaaacaaaaaacaagtaatccaaaataaaataatgattttccaagtgtccttccttcgattaaaccgaggtcaccaaatctgtgtatgtaacaaaaattgtagtggaacatattgaatcagcagcgttactgtataattattttttgattatatcattacatcaacataaattatgatttcctatcattctgtgaaattactgttttcaattttgtgatttgtacttgaaaactaaacctaataaaagaaaataagttaggaatattttgttttttagttttgaaaagtggggctattttttgataaaatatcatcaactttaacaaaaatagataaaaaggttatagtatatattttttagttacaaaattgagattgagataaaaataaataaaatttaatggtcatcgataatattgagatttgaagtgtcgattggtatttgtatagtgttgtatctctctctctctctctctgtctgtttgtttcagagaaggatttttggcgtctccacgcacgatttaacgcatcgaagctctctgcacgcttcctgaaagagagagagaagagagagatcgcagatcgatttctcttaaatctctcgtgaatcccatttgccttctctctgctagattctctcttcttctcttcacccatttctcgctttctcctttgttctctcatctgggttcttctcaaagcctcttcctttttatgccatggtgggtgcgtcttcctcttacgcatctccgttatgtacctggtttgttgctgcttgcatgtccgtctctcacggtggaggagatagccgtcaggctgttgctcttcaatctggtgggcggagtcggcgaaggaggcagcttagcaaatgctctgtcgcttctggatccgctagcattcaggctctcgtcacttcttgtttggattttggtccttgtactcactacaacaacaacaatgcattgtcttctctctttggatcgaatagtgtttctttgaatcgaaaccagaggagattgaatcgtgctgctagctccggtattacatttatctcctttttttattttctcttccaatctggggttttgtttttatgtggcaaggtttagtttttatagttcgatgttgttatgggtttatgttagtgatgaaatttagaggtaaagttgaagtgggaagcagctgacatgtgaaagtttgaatttttattgtgattccatgttttatcatctttcatatgaaagcaaactctgtgaggttagtctctagatgatacagagcttcgaaagctgaccaaatggcagtgaacttttatatctaaattttgaagttggctgtgattcttttgtttatcttgctattgagatgtggtttgtggatagtagctgattaagtttatctaccatcaactggctttgtgggttttaggtggagccatggcagtgatggagatggaaaaggaagctgcggttaacaagaaaccacctacggagcagcgtcgagttgtagtgacaggcatgggagttgaaacatcattgggtcatgacccacataccttctatgagaatttgctacaaggcaacagtggtattagccagattgaaaattttgattgttctgaatttcctacggtacgtattatttatatcaggatctcttggaagctttttggtgtgcggaatttctccgtttgcttttgtgtgtactagaatatctttctttgttttacctttgtcaagcgaattgcgggagagatcaaaagcttctcgactgaaggatgggttgctccaaaactttctaaaaggatggacaaattcatgctctatcttctcacagctggtaagaaagctttggctgatggtggggttactgatgaagtaatggcagagtttgacaaaaccaaatgtggagttttgattggctcggcaatgggaggaatgaaggtactttctcgagcccgggcttgaatgtatagaaagtatgaaaacagtttcattttaaggtttctgttcagtatctcgcctgattgttccttcatttaaccatgctttcactaacaaaagagtcacatgaatattgaatctaaaaattaggaagtctgttgcgaatcgttgcatttctaataatcttataataatacaggtcttttacgatgctattgaagctctgagaatctcttacaagaagatgaatcctttttgtgtaccttttgcgacaacaaacatgggttctgctatgcttgccatggatctggtctgattaaatttgaaatgctcttaatatattatggatgaccaccagcaatttagtactgaccctttttattttgtggtcatgtatcagggatggatggggccaaactattctatttcaactgcttgtgccacaagcaacttttgcattctgaattcagcaaaccacattattaaaggtgaagctgtaagtatcctccatacacttggaaattcgacagtttggtagacttcctctgtttctacttatagactgtttgtctttccactaaacttttcaggatgtaatgctctgtggtggctcagatgcagttattattccaataggtgctaactcgttctcttatattttacattgtcccatctattcttgaaatttaagcgacgtgaaatcgtatcgtatgtgtaccaatgcagggttgggaggttttgttgcatgccgggctctttcacaaaggaataatgatcccacaaaagcttcacgtccttgggataccgtaagtttaaacaatttcgtgtcttgtcttctattccttttgttacttgcatgttttagtacccttctatggttttgttttaatcttggtggatgctagaaacactgtatcgagtttttgccaacaggaatttcccttacattgtaatgttgtaggaaagaaagtgtgaggaaacgtgcgtattatgtttggaaattcttcttgttttgttaacctggtcttgattgcatgacagaatcgagatggtttcgtgatgggagagggagctggagttctacttttggaagaactcgagcatgctaaggtatataacttattcgttctttctgtcatttcttgtttcccatttttaaatcacaaaagaaacttatatccaaagctttttttattgcttgctatggaacgagttgtgagaacataagtattctgcttttctttcagaaaagaggtgcaactatctacgcagagttcctcggtgggagtttcacatgtgatgcctatcacatgaccgagcctcaccctgatggtagtttcattttcccctaatttatattagtctgctagtcaactacaaatttgaaatctcttttttctataatttttttgtcattatcccatttttcttaaatccgcaggggctggtgttattctctgtattgagagagcgttagctagtgctgggatttccaaggaacaaataaattacataaatgcacatgcaacctcaacgcatgctggagatattaaggaataccaagcccttgctcactgttttggccaaaatcctgaggtagcttcagttctttgttacaaaattccgaagtgcctttttatgtgcttttcttgatctttctcgatgtggcagcttaaggtaaattccacaaaatctatgattggacacttgctgggagctgctggggccgtggaggctgttgcaactgtgcaggtaactcatttgactcggtgtatctacaaggaaggaagtgttgttgaaaccaagttttagcatagagcgaaattatgtgcaatcttcgcatttttaatgttaatattctgttgctatctacaggcgatacggaccggatgggttcatccaaatatcaacctcgagaatccagacagtggagtggtatgttagtttcatatgagttcaatacctatacaaagaccttttaatgttcgtaaaaaaaaactcttgggagttttaataatcgtactgtgaaatgaaattggagcaggatacaaagctgctggtgggtcctaagaaggagagactggacattaaagcagccttgtcaaattcattcgggtttggtggtcataactccagcatcatttttgctccttacaagtgaaagcgaaagcagttgcttgtactccaaacctgattgtataacttgctgtaaggtaaaaagttacatccattgtacatttgtgtatcatcagattcttagaggaattgaaggacagttaactcttttgacctttctatatttattactttggctgagatggatcattggcaataatgaattggaagtttgtgcaagttccctttgaagtattgtcggtccagaaatgctctaaaatgatttgggatggactaagaatttgttatgaagctgagtgtttaaattatgtgcagtgttttacaagaagtttcccatgttatgctagtgttacgtcgagggaatcaacagagtttgttcaactaccaagagctaagctaagtttcttaggatcaagatctgatgagccaaagacttggacaggagctaaaacgtgctagagatatcagagtttggattcgccattaaaattctgtttcttgtgataccttcttattggaaatctttgtagtctttacatttctattgtttaacatgaaatctcaaaaaatgccaaatcaattctcaattttaaatttagtagctcttgacagttttccctttgttaattacatatatagagagtaactaaatcatcttttgaaaggtaaaaactaaaaaaatatattccaagggcccaatgttttaccactttcatatgtaagcttattttctgttaaatatgtgaaagaaagaagaggaatgaatcagctgtgaaaaccaagagcaagtataaaaacatggctaaaagggtatcaatcagccttgtataagagagccataagtagataaagtttctacagtaaaaacaggaatatagagtactattccttaattagcttatgttcttctattcttcttgtgacctctatcttgcatttttgtgaccaccccacttgccttcttctttttggttgcatactctaaataatatccagactttgatgtctttatgcgctctgggttcttcttgtgacccctcttccttgtaattgtatgtacctgcagcttcttctgattttgtttcttatggatatgtttgtgatgtataaaattttgtgaagatgtttataaaacagttaaaaaccaaattaaccaatcatccttattttctcacgagccactctatgaaccttacgttatctcgatgtacctgtaatgagttagcaattactacaatccaagtcaataaaataacaagttggacgttacgttataaaagaaaatcaaacttatttgtgtgttcctaacaaacgcatgggataataacaagagaataaaagacagagtgataggatcaacggctattgtgcgtaggagaacacagctgctatataagccgcgtaacaggtgattactctgactacgacaccaacaagaaaaattctctcaaatgtgggcagttaagttagacacgtgtaaggtcgcgattcatggaggagacgtgctcttcccgctttttgtaattatttattactgttgtcataaataaaacactaaaaaaaaattaataaaagggaaaatacaaaacgtgatttatggatcaaatttgcattggtggtggagttttggttatgtaagacccacaccgtgttccctctatctaacgccgttaatcctcttttttcccccaaatcataccgttaattctctttgagtgctaaaatatcacgccggtctatgagattaaaatagtagactaattaatagtgctaaaaatacataaattaatgccaagagattcatcttaaaaaaaaggatatatgaaccaactaaatggtataactgaaagactatcataatcaaatttcatctgaacattgatttgtttgaactaattaattttaggattttacgttttcataattttttattttatttgaacatcttgtaagggtaaaatggtaaaaacaggagtagtaagagggtgaaatggttatttcaagtgtgaagcgtggggacgtgggtgacggtggtgatctgaaacagtggtctgccgttaaaacattaaattaaaacacgtgttttaaatgtctctatgttaattaatactataagagtatattttactaatttccgtatctgcaaccagcgaaaaaaaagtaataaagaggtcctccatttcttcctcgtgacaaaacgcacttggcagagaaagataaacaagaaccctaagtttttttataagattcgagaaaattcaacaactcaggaaggaagatccttttgctccaatttctcaatcgaaacgatttcaatttcggtttcaacgatgtcgagtttttctgccgagtgttgggacttctctggtcgtaaaccgagcttttcacaaacatgtactcgattgagtcgttacctgaaggagaagggtagttttggagatctgagcttagggatgacatgcaagcccgacgttaatggtaatcaacctttctcttttagatctgttcatttcgtttctgcgaattttgagtttcctgttgcgaattacgaattatgaatcgattacatgttgtctggaaattgaatcgttgtagagaatcgatgattaatggattttgaatcaatttctatatatgtatgtatgtgtatgaatttgtggagatggttctgtgtttggtttaagcataatcctctaaagccataggcctggtttagtcattaagtagattttgttttgcagttgtttgagagattggtgaatgataataatctttacttttggatcaattttcgcaggaggttcacgtcagcctacaatgatgaatctgttcccttgtgaagcttcaggaatggattcttctgctggtcaagaagacattaaaccgaagactatgtttccgagacaatcaagcttttcttcttcctcttcctctgggaccaaagaagatgtacagatgatcaaagagactactaagtatgtgtttatatgtatatagtgaaaagaatcgtctcatatagtaagctatgtttcatcagtttaactaatttttgtgtgattttgaacagatctgtgaagccagagtctcaatctgctccgttgactatattctacggtggtcgagttatggtgtttgatgatttttctgctgagaaagctaaagaagtcattgatttggctaacaaaggaagtgccaaaagcttcacatgtttcacagctgaagtaaacaataaccatagtgcttattctcaaaaagagattgcttctagcccaaatcctgtttgtagtcctgcaaaaaccgcagcacaagagccaattcagcctaacccggcctctttagcctgcggtaattgatctcagcctcttttggttcaaccatctctgagcttggcttagtcctatttctctaactttctctctttttgatttgtagaactcccgattgcaagaagagcttcacttcatcggttccttgagaagaggaaggataggtaatgcattttaatgaaaacataatatcttgttattccataagttcttgttaagcgaatttctcaatatcctactcgtaaacctttaacaggatcacatcaaaggcaccataccaaatagacggttcagctgaagcgtcttccaagcctactaacccagcttggctcagttcacggtaaacttcgagcctgtccgacccagaaggcacaacttgagagaccttcttgtaagattcttctgatgctccatcgttacaaatatcaagctgctcctctgttcattttttctatagattaatttcacccctagtagttttgtttgtttaactcccccgaaaactcattatatttgtatgaaatcaatatcaatagtgttcaatgtttgcttctggggtttaagttttagccagtgtgtataaccctttcctctgccgatctcaacattagcttgcaacttttgtaagaaacatcacttgtgtttttgtgttgatggccattaatataatccaagtttatttaatccgattgtttgttcgtcacttattgagagctgaagcttacagttaaggaacagaaatacttaaagcattctcgaaaataaagaaatgtctaaaaaatgatgattttctatcaagtattgtcgtgtgaaagattttctttaacaagtctgctattgttcaaaatacgttttaacctatctatccattatagtattagcattttcgttttgttgttaaatacatggcacaaactatgtagactatttttggttaaaataccaagccagttacaattttgtttttcccaaaatactagttataactttgtaaaatatccgaagtccataataaaaagagcttcataaatatccaataagtggagtagatcagaccaggcttggtaggccacgggaattctgacccacgataactttttttcgttcggtcttgaacaatgatttgttcggtcttgaacaatgatcatccaactaacaaaacgtaaatttggtccaaagactggtccgaaattcgttatgattaataagcccgaagaacctaagatccaattttatccgatttggaaaaaaataactgaatttttcagcattaacaaatcgccaagactacgtaatttggatcggacagaatcggccccggacttcatctaatcaaagttgttcaaaatggtagggactaaagtttttaccaaaatatcattgtttttttagttggggaaaaggatcttttattaatttctgacaacgggccaggatacaacaagttgcatatttaagggcccacgtgcatacattgcactaagaatcataatgatttaaaactcataattgtgtttcttcaagtcttaaatttattaaaacgttattttggtttcttcattaaaatgatagtacgcgttctctattattttttgaaagataatttaagttgtttgtaattaagaaactgaactcgagtaatagcaaattagcaacacattacatttttgaacgtaattttaattttatacctctataaatattttgattggtaacgttttctttaaaataaaacagaagtaaacccacaggactttgtatttttgatcaaaaagtgtaaacatattcaaacaagtcttctagccacaaagttttagacttgtggaaaaaacaaaaaaagacatgtgtattgcacaatcttacattttcaattgattgattcaatgttttggatacagggaattgagaaattggcatatatacatacatacttgttctacaaagctatttcacgaaatgattattgatttatgtgattccgaggaaaagccataaacattactcggtattaaaagttaacaaaaagcaaacttctatacaatgtgctttttaacctaaccaaaaatttcactttttttttttttgttattttctaaccttttttcttctattaaggtaaaatggaatgatgatcacttttttttttatatataaataaaatatacttctcttcgtattattgtgaattgtgatcatcctaaaatacgaatactccggcagataatctctgtccggcggcgtaaggagagctcaaaacgtcggcgtttcttgaaacttgcgttttacattgctcttgtcgttcgtcattcattatttgcactgatctgcattcggcactacaaaatcccatctctcctctgcacacaacccaaaaaaaaaaggatcagtttctagaaaaaataccaataaaatattgaattagtctccaatttaacaaagatccaagaagcaataatgcgatgaaacttacttgtacatgtatatgtctttgccttgaagtttcttcttacacaagcaacacgaactcagaaactctgttggacccctaacactctgtctttcaataaccggtggttcatcgacggtaaccatcggtttatgaactctccgataatcattttcagacaattcaaacccgtcgtcgttgtaatacactttggtcggcccgtttgggctcgtaacataagtgtattcctcatccgacagatcaatctccgggcacctgaatctcccggagtaacgaaccggatcatgccggttaatcccgttgctagtttcctccaacgcagcaacaatacccaaaccgacaccaccagaaccgaaccgcttcgagtgaaccggggaggggaagttcaaatccaacggacttctcggactggccgtgtactcctccggtttaatagcagcagatctgcttcttggaaccaacatctcagacaatttacggatcattagatgaggtctcttgcttagtatcataatcaagaattgagaaactactgttcttgataaagaaaagaagaagaagagttaaactgttgttgattacaaagaaaataaacagtaaaagaattgagaggaagatagagaaagaggaaaggaagaagaagaaggcaaaggtaataggaaagaaagaatctgatagaagaagaagaaggagatggagaaaggtagagagactttagagtttagcccactgattatatttctcaagtttggaattttgtgtgctatgattaatgattgaagtttatagaacggcccaccatcaccattattatttttgtatttatttatcttgtttggtttcttttatcgacatcatctatataattctatatatacacaattattgatatgagcaggctcagatattattttttcttttcttatgtaatgattccttttcttctttttttttaagcatttcattggagtgtggtaggaccgtgaggacccacatcaagaattcaaatgtctttttctgatattttgttttatattattgggaatccaagactttctctaatgtaaaaatatattctgtgatgtacctgatatatatttttaaattttatgtaaatttaattgtgttattttttaattcaccgtattttatattaatagaccaattcatctatacttgaaatgtggattgttttctagtatttattagcacctagattattagtattagtttagctagtggtttttattttttcttttttattttgtctcgaatgaaatagtggtttatattgaaagtgatggtttttcttatttaagccgaaaatcaggtggcaatttgaaaatgatgggaatcttatccaccccaattttttttcatttttttttccgattactgatatttttctcgattcaattctattttctttgaagaccgtttctcttccttgatttccaatcctaatttcttgacttattgatgttgaactttgtaattgtcatcaatactatcgaaatgcttggaagatattttatcatatttcatttatagaaacccccttgtgttttaattaggccaagggaaccttcgtacttcacttaagttaactactttatcacgaaaatcaatttttaaaacaatgggctgagaaaaatgtttaatgactaaggcccaactataagattttgggccggataatataatcttccaaactcatcgtgttcgaaggatattcttcagaataatgaaatggacttttaacatttattactagaatcttatccgatttttctttacaacaaaaaaatgaaaaaatataggtgtgaatatgatccacatcaaattcggatccgaaacgaaagaaattcccgggtcattggagctccgtgttacaaaaaatctccagatttctccatgactccaaggaaaatctcacagttcgctctaaaaaaatattatgtttgggaattcaaaaatcccaaagaatcaaagattcatctaataaactctctcctccgtaatcttcgatgggtaaaatctctgtaaatcgatcaccaccggagaagccagagaagtcgtcggagaaggaatcaaacccgaaattcatcggaagcaaatccaaaaacgaaaaatcataatccaccgtcgatgtagcaacagatgcagatgtagaaggagactctggtcggatctcggatccgggtactaaacccgattcttcttctcccttgacaatgtcttggaatgtgttagcgaatctagcagcagcttcctgaatctccggaggcgtcaacgacttttctacggagatcgacggtggattattagggaaattgaaattagcatcgccgccgcggagacaaaattgagcggcgtcgaaagcacgcgccgccttctcgggagtgtcgtaagagcctaaccaaattcgttctctgctgtgtggaagtctgatctccgatacccattttccccatttcctcttcctcactcctttgtactttgactgcatcgccgtgtttctcttcttctcctcttccttcatcgcttgcttcaccattggataaaaactccggttcggttcgattcggtttggttgaattggattctgtttccggttcttaactcgagtttcagttgtgtaggttaattctgttatatctggttgatttcgaatttgcggctgtgtgggatttatatatgaagaagtggaagtggcaagtgaggaagaagatcaacgctgactggcgcgtgaagatgggacacgtggcggattgtattgagtggctaacgcgggaatagtgagactgttctgctttgtcgtgttccttgttttccacgtgatttaattcaactctcttttgtctttttgcattatatctgaatgattatctctatttgtttaggcacgtttgttttaaatactgagattttcgtcgcgacttctgtttctagaattttaagactacttcttcttttgtattttagagattattgggcgttgaatcggacacacataagtattgttattataaatgtttgcatcaatggttaggctcatgacatttttgatgcggacactaattaagaagttaagaagcaagtatatgactcactgttttgaagaaagaagcgagtcgtctgttgatcataacttgagattcgtagaagaagaaaggtggaaccaaaacagaagtttcatacatgaacactatttagagcagtagctatctcttttgtttacgcattctgttttccaaataagttaaaaaaagttaccttcttttaatcccacttctcaagatggagcaataattgaattgaaggccagtggccactactaactttcattatactttgctcgagatagccactactaatgaacttgtgacacaaccttgtgtaagaacagtctcccttagattcaataatcaatttccattttgggaaaatcgtttgttactattatttatttgttcagaacccacggaacagattgcccccaaccctccgagttaccaactttataggttttcgctgagcaacaacatcccattagaacggtgaagctcatcatcatgagcatgaaggagaagattcttgttgttgtggtcgccattatcgatcaaaagatcacaaattaagaaaatcgaagaaggaagattgaggaatataagtcgatgagttatttgagtattgatgaggaaaacaaagactatacgaactctctatttataaggtttacggaacctaatccttgccggtttaggattttactcaacgtttggaatatattacatgtttatttcctttttcaattttgattcacctcttatcttgcaaaaaaacaaaacaaaaaagtgacgtttaaagatctctaatccttttctaattaactttgtgtatgatttttagttcttctaatttctatatatttttgttcataatatgaaaatttgatctctgttttaattattttggaactaaatacacatttttaattagattagtaaaagagttataattaaaaaaagttgatctggttggtgtcagcagaacaaggaaaaaagagaggctttttcgttttgatcctcctactcttcttcattagtgaaagctacttataaagtccaaatcttgaagtgcgtgcacggtgcaccacgaatccacgatccagtgagcagcagcaactccatctccggagctctagattcagataagaacaatggcgattccgatgcctactcgccagctattcatcgacggcgaatggagagaacccatcttgaagaagcgaatcccgatcgttaatccagctactgaagaggtcattggtaagcgcttttctcaaaatccgccacagctcgattagatccaagtaaaaatgtatacttttgtttacttcttagttcgatgtggagatattacttgctcctaactctattcatgactatcttttgctgtatcgactactttctttccatgaattttagttgaagttgatccaaggatttgtatgtgttggatgagataggtgatattcctgcagctacaacggaggacgtggatgttgctgtcaacgctgctcgaagagcattatcaaggaataaagggaaagattgggccaaagcacctggagctgttcgtgctaagtatttacgtgctattgctgctaaggtattcattttatgtttgtgattgtgatgctgtgttgacaaagcctcagttttgtttgggcttttgtgtaatcagttttagtcttctgttatctgatgtgtaggtaaatgaaagaaagacggatctggcaaagctcgaggcgcttgattgtggtaaaccattggatgaagcagtatgggatatggtactgttgcttccattttgtttttgtgaaatgtagggttttctttgtaggtttgatcttaaatgtgtttgtttgatcttttgcaggatgatgttgctggatgttttgaattttatgctgaccttgctgaaggattagatgctaagcagaaagcaccagtctcgcttcccatggagagttttaagagttatgttctgaagcaacctctcggagttgtgggacttattacaccatggtagctttccttttgtggttaacttgtttgagtctatatggcacctattctattttatatgaccagaaactgactcatggatctggtttgatgttgaaggaattacccccttttgatggctgtttggaaggtggctccttcccttgctgcagggtgcactgcgattctcaagccatcagagctggcatcagtgtacgtaattgtgtataatctgttttgctcttatgcttctgtattggtccttatttgaacacgtctcatggttctaaattcagtacttgtttggagcttgctgatatttgtcgagaagttggtcttcctcctggggtcctcaatgttttgactggtttcggttcggaagctggtgctcctttggcatcacatcctggcgtggacaaggtattggtctttgagaatacagtaaacataagtcccaacaaaattaactctaaaggctatgattaaacattcagtttaacgtctgcgtttcttaaacgcttcaatgctaagttatgatttcgttgcagattgcatttactggaagtttcgccacaggaagtaaggtcatgacagccgctgctcagttggtgaaggtaattccaatttttgaactttctgctgtatattccttctcctccttttgtttcatcaccaatgtcaatgacacattactcatggcattgttgcagcctgtttctatggaacttggtgggaagagccctctcattgtgtttgatgacgttgatcttgataaaggtgaatgtcacaaaaagtagtttagtggatttggagtttttttataataacttcttcttgtgctatattcaagatagtactaatgcttttgttgctttgagacgagtagacatgacttaaatttgcttaatcttaaaattaaactctttgtatgttttgacgccggcaaatgatagctgctgaatgggctcttttcggttgcttctggacaaatggtcaaatctgcagtgcaacttcccgccttcttgttcacgtaagtcccaatcttctacttgctttaaggttttacctgatcttcccaatatgacatgcgaatatttattactggagaagtgaatgttccaagtcatacgggaagatgtttccattaaggtcaatgacaatgacatttatttcagatcaaaccttctggtggatatgccaacagggatacaattgctgactctcttgtctaaatttttttattttatatcttaggaaagcatcgcatctgagttcatagagaagcttgtaaaatggagcaagaacattaaaatttcagaccccatggaagaaggatgcaggcttggtcctgtagttagcaaaggacaggtaaaatcccagtgatcgttttttctgtcttcatattatttgtcaatttcccatcaggttgcaatacaacaaccaggactaaaaaggaaaagagaattgagttctgtagtatagtgattaacttttgtccctctaattctgaaccgtttagcttttagagcatcaatcaaatcacatctagcatatgatatttcatcacgcttatcatgttcttacttggtaggtgtgcttttcttctatgatcatataatctgattgagctgacaaatgtaaatattacagtacgagaagatattgaagtttatctcaacggccaagagtgaaggagcaacgatcttgcatggtggttcccgacctgaggtattacatctccctcccttacctatccttgatgcagtttcttccagactatgatgatgaccttttatatcatatctatatttcacagcatctggaaaagggcttcttcattgaaccaaccatcataactgatgtaaccacttcaatgcaaatatggagagaagaagttttcgggcctgttctttgcgtgaaaacatttgccagtgaggacgaggcaattgagctagcaaatgactctcagtaagttaacgtttctccagaaagtgaaatctgatcaaatcccatccgctgacactggtgtttaaatcaaatttatcatttaagatcttatgtggctgaaaattattcattgattaatgacagttacggactaggagctgcagtgatatctaatgacacagaaagatgtgaccgtataagcgaggttagtaccggtttcttgaaccattcagatttgtttttaatgcctagcaagtgaaataacaataccatcaaataacacaaacaattggtgtctactttgttaggcctttgaagctgggattgtctggattaactgctcgcagccttgctttacccaagccccatggggtggtgtcaaacgcagtgggtttggacgagaacttggagaatggtacatttctttttctatctcgaatcttgtttttaaaagactatatcttgatggcttgtactgaacaaatcttggttatggctggtttcttgcgtgcttcaggggacttgataactacttgagtgtgaagcaagtgactctctacacttcaaacgatccctggggatggtacaaatctcccaactaagtaatgaatacattgtcatggaaatggaaaccaaaccaaatgctgtctgttcaaatctttgtgcttttattatcagtctgtctagttcggtcctgaaactcttttgtaaaacctgttgaatttataatgaataaaagatgctttgctgataattattggttgttctataaaggccagtattgaggcaccattttaggctctggtgcagcagtatcaagaacatgaaccattttatgtcaccttcaagtcacatcaaagttaaaactcacatggcaatcaattccaaatcataacttttttttttactataattgcttgaaataaacattttatgagatctgaagatttgtggattttttttccattttttaaatagtaaaatgtttggcaaccaaatctgaaaaagaggtaaagacgagaggtctcgcgcttatccttaaaggactgtggtgaatggtgagtgtgacttggagggaccccatcaccgcaacaatacagcttcttagatctcgataaccacaactaacctgtcacagtttcgattagatcttctcaaaaacttcacctttttttgtttttccagtttctcagaggagatcttccttcaaagctcaaatccttttgtctgaattgtgatactgctgtccccatttttctgcaagttgggaaatttctgtcaaagttttgtgggtctgttaaaaagatctgagctttgaacatggggagctcaatggaggagaaagtggtggctgtgatcatggtcggtggtccaaccaaaggtaaccgctaaatatgtttgctttttttctttctttctttctgattcctcctcaaaagcaaatgactgtgaaatctcgattgatcaaatctaattccgttagattttgatatccaatgcgtttctctcttgtttggttattagtttcgtgtatccgaatgattatggttctgattctgtgtaaatattggttattgagtgatgcacaggcactcgatttcggccattgtcgctgaatattccaaagcctctgtttcctattgcgggacaaccaatggtgcatcatccaatttcagcttgtaaaagagtaatattcttcactcatgatttcaacaattcagatcactggagagactgagagatgatgataccaatcccttattgtctgcagattccaaatttagctcaaatatatcttgttggcttctatgaggaaagggaatttgcactttatgtttcagccatctctaatgaacttaaagttcctgttaggttagtgaatctctcctctttttgcgttagcttcagctcaagtatcagtggctcattcgtgtagctctgatctttcttctctgttttttttttttgggattctgcaaattagatatctgcgagaagacaaaccacatggttcagctggtgggctgtatcactttagaaatcttattatggaagatagtccggttagtctccaaggatcttactatatagaatcattcttcttttgtgttttatggactaaatgcttcttctcacatctgagttcctatatctacttcttgcagtctcatatcttcctgcttaactgtgatgtttgctgcagtttccccttgcccaaaatgctcggtatattctttttcattaatccaaaccttgtgaggtctcatcttatggttttgaaggtcgttcttaactattgctacttttgatcaacagaggctcacaggggatatggtggaattggaactcttcttgtgatcaaggtttgtgattgtatatgattagtctggtttttgtttttttggcgggtcaatcaaatttgcttctgcgttttggtttttaggtctctcctgaatcagccagccaatttggagaattggttgcagatccagttactaatgagctgcttcattacaccgagaaacccgaaacttttgtatgtacatttattactgagatgacccaatctttatagcatcttcaagctttgattcttatgttttattttggaaacacaggtcagtgatcgaattaactgtggtgtttatgtatttacacctgaaatttttaatgccataggagatgtttctactcagaggaaagatagaggtaaagcagtaacaaagatcttacacataatttgtgttttcttgtcttagctttctatctttaaagacttctcatctttttcctctgttttgttgtagcaactctaaaacgtgtttccagcttcgaagctcttcaaccggcaacaaggtttgtcgattgtctccttgtccataattgaaaaccattcgaatcatcttcttaaaatgatcttttaacttctttaaaataggatcccgacagattttgtaagactggatcaagacatcctttcacctctagctgggaagaaacggctatatacttatgagactatggatttctgggagcaaatcaaatctcctgggtatgtattgcttgccttgtgttttcatttctttgaagccgcaaggatacaaaatgtttagcagcagctgaaacagggatagtgtttatggctctgacttatgagttgacttttgcacaggatgtcgttgaggtgttcaggactctatctttcccaattccgcttgacatctccccaactgttggctagtggtgatggaacaaggagtgccattgtgattggtgatgtttacatacatccttctgcaaaagttcacccaactgcaaaggtacttacatatggttttgtccctcgttgaagcaatttcttctgattccacttttatcacaaagcattaagtttcatctattaacagattggtcccaacgtctcaatctctgcaaatgctcgtgttggaccgggcgtcaggcttatgagctgcatcatccttgacgatgttgagatcatggtatgtctacttatacaagacacaaagtgaaaaacggttaaattttctcgaggttgacccttcagtgactctttgcccaggaaaatgcagtggtgactaacgcaattgttgggtggaaatcttctatcgggagatggtcccgcgtccaggcatgtttccctcttctgctcatctcttaagagcctgactcattctttttggaccttgaaatgtttttgtttgattcctttacaatcgtgaacctgaagttgtactttgttgatcacaggctgagggagtctacaattcgaaactcggagttacaattctcggtaaactgttcctccattgtagctccttctctttatatacagaaagcaaaatctctttatagacagataactaacctcaaacataatggttacaggagactcggttgcagttgaagacgaggttgtggtgaccagcagtattgttcttccaaacaagacactgaacgtcagtgttcaagacgagatcattttgtaactgaaaaacggaagttgaaaaatggaaccaacccagtggggagcagccacactatctccctctgattcaatatctactggagaaccacataagcaaatatttgggaactaattcacatgtatcatttatttacaccaagaattttccaacattgtatcaattccattttctatactcacaacacagctactgtaaaaggcactgaatttttgcccagaataataaagcacttgtgtagttttggcattgataataaactgttcttgcaaaatcctatgaagcctttcctggtccagtctctattaactgcaatgcaatgctttggggaagtattgattgttgtaaacatagcaagagtctatccccaatcacatgcagactagtaacttcatagcctgaacttccggagaagccggctaccagatttactctgcaatctcaagatctcctttgcaaaagcttgattccctgtcaaaagaagcccgttcagaactcgattaaaagtaaatttccggggtataaaccctctctcaaccatctcaagcaatagtttaccagcgaccaccatatcttctgatctttttctcacaaacattccacttatcagtatgttgtaagtatctagatttggcaagcaatcaccactccccattttctcaaacaaacccaacgctttctcgacctcgctgcattccgaataataacggatcatcatgttatatgtctggaagtttggttcacagccttcattctccattctctgcatcaactcctctccacgactaaactctccagcgtgaaacaaccctcttatcaacacattataagtcgtcacattcggctcataacctctcctcaccatttcctcaaacatcacaaccgcattctccacattatctttcttacacaaaacttgaatcatagcattgtacgtcgcaacagaaggaagcacaccttctctaatcatctcatcgaaaacattcctcgcccgctttatctcccccgcaacaccaaacccgtgaaccacagtagtataagtgacaacatctatttcacaatcccgtttcttcatctccaagaagaattcccaagcatgtctaatctgcccagctctgaaaaaacctttgagcattgtgttataagtagtcaaattagggtttatccctctctcaaccatctctttcaaaacttctaaagccttaggcgtccttttaatcaaacaccaaccgttaagaatcacattgtaagtaactgtatcaacactaaatcttcccctaagagctctaaacaactcataagctttctctacgcgtttagatttacacaacacatcgagaatcgtattgaaagaagctaaatcttgaaaacaaccatgttcgtgcatattcagaaacagcttaaccgctttatcgggcttcccagcggatgcgtacctctcggcgacgattgcgaaggttttgggagaaggaccgatgcggagagagcgcatacggtgaatgagtgaccagacggtggggtggaggtgaagacgggcggcaatgtcgattgcgagatcgaaggaggaagcgtcgtggacatattcgcggtggtgattgtcgaggaagtggaagaattggagagctttagggccgtggttccagagtcgcttgagaacagagttcacgagatttggggtccatggggttgttttggtggagagtagaaattgatcgtcttggtgagttgtgttcggagaagagaggataagcttagctatggcggcggaatctgccggcggtggtttgagattggctccggcggccgaagtacatagcgatttgctaaaaagacgtttcatcgattggtttgttttattttgttttgaaaaaagtctttttaagtgacttcttgggtaatttggtgtagttgtatcacatttgtttaccgctaaataatgttttaaccgttttatggaacgtttctttctttttcagattgtacagagttagttggtttatgggtctaattgggcattctttggaaatggtctcacaagacattgtggagttcaaagaagagttcgacgattctcacaaaccaaacagcagagtcgattgctaaccaggcctttccatctaaaacatattggttataattgatgcattgcggtaggagtatagcgtatccgttgtaattgattatgaaaataataccaaagcgattaaaaagatactttcaccgcaccgttctttctatccgttactttataccacttttaattatttacatatcgttaaccgctttctctatctgcttaaatttttgtaccgttttatgttattaatcaaaccttgaatggatatgtttgtttttgtaatggtgtccaccaaagtttatttgatgagttacaaaaataattatattttaaagttttgagaaaaaaaatcatgtttgtgaactttcaattgattcacctcatgaagattttataagttctatatagattttgtgaatcttcaaaagtacaaatatatgtactctttttccaacataaatgtagtgaaaattttattttatgtgaaagaatgaaaagaaaccaagtgaaagaaattaatagacagtacatgtaattactgaatacgaaagataaaaagagaggagagtagtcattgtcagatagaaagaaagagcagacaaaaggatcgtaaaatcaaagaaaattgggtccctaaaaagattatgaccgtgaagacacaatattacgttttctgacaagacataaacacatcactcatcgcctttagattctcttccgaccctcacaagatcttaacaacaacaacaacaacatcaagatccgatcctccagattctcttctgtgtatttccttaaatctcctcctctttctctttcctatttatttatgtatctcactcaccgcttctgcctctctctctctctctctcttatttatgtaactcctcgtcttccttcttcacattgatttctgcgtcctttgacgttcaaactttaaacgtttcttcatctgttttgttgtttactttcccgagagaaaacaatggctctcagagatttatcttcttctttatcttcttcttcttcaccggagttacatgttcttgccgttgatgatagtttcgtggatcgtaaagttattgagagattgcttaagatctctgcttgtaaaggtaaaaggcaaaactgtttctctttacgttttctgcttttcttttgtttggtttctgattcgtttttttggataaatttggtgggtttctttatatagtgacgactgttgagagtgggactagggctctgcagtatcttggtttagatggagacaatggatcttctggtcttaaggtatatattcattcatttcttagaatctctctgttttctagcaaaatcaaccctagacgttgaaacttgaagtgttcttatgctggtttggctcccaagaaatctaaggtttcacaatgtggatcaaaagtttaacctttagaggatgattttattatttgtttattgatgccgtttatatgaacaattttgcaaattttgataacaggatttgaaagtgaacttgatagtgacggattattcaatgccgggactaacaggatatgaactcctcaagaagatcaaagtaaatttctattttgtgtcatttattagagcaagatttgaataagctcttctcgtgttttccttacaaaaattctgttgtatatttgccaggagtcttcagcactcagagaaatcccagtagtgataatgtcttctgagaacatacaacctcgtatagaacagtaagtcactatagctaaagatacaaaactgaatcaatggatcttaacactgtaatctgatttttttgtctatcctctcttttgttgttgttgttgttgtagatgtatgatagaaggagcagaggagtttttgctaaaaccggtgaaattagctgatgtgaagcgtttaaaagaacttataatgagaggtggtgaagctgaagaaggaaaaaccaaaaaacttagtcctaagagaatcctacaaaacgacattgattcatctccatcatcatcatcaacatcttcatcatcgtcgtctcatgatgtttcctcccttgatgacgacactccatcttccaagaggatcaaattagagtctaggggttaaatgattgagctcaatcttttctcacgttttctcttgatttccttgtgtaatatacattatttttgatatatgcaactatgtaagtctagattctaatgctcaccttattactctgttttttttttttgttaaaacaaaaggagatcaatgtgaatatgatttaaacaattttataaaattaaatactttgcctacagtatatatattgtttcctacttcacaaccagatcaattagattctataatgtaacatataatttaaaagtacacgtaaaaagattttgtatatgatcttccatgtgacatacacgatttcacttgtatgtgtttataattcataaactttcaagcatcagaaaacaaaaaaaaacgaatataatctttgttggaatacattatctattactatattcctagttgtatagcagaggaaacttgtttgcacttacgtggcatcttatgattggttcagtgatgtctgttttagaccgttgagagacttggataccattgcggtcttatcccgaaactccaagaacacataattttttttcttggtggtctctccaatggctttctctgcgactgtgtctcagctttcttctctttcaaccatctcctcttcattaccaatttcttctagaagactccctcatcgatctcttcctcaattcacagtcaaagcagaagcagagaaagagaaacagagcacacagggcaagtctgatggggaagcatcaccagctgcaaccaaaacccctaaaaccctccccaagaaaccggtttactcgagtctgttccctcacttttgtttctaagtgttgaatccaataacagatttttgataattcttttgaatttctgtttctggtggatgagaaaacagtgaagaagggccaaatcgttcgtgtggaaaaagagaagtacctcaacagcatcaatgtatagtcgaaatctttcccagttttgaagctgcttcttcaaaaatctgtttctgaaacttttgttttgctacatttgttgaaattacagtacttatcagttggacatcctcctttctacaaaggacttgattacatatacgaagatcgcggcgaggtataacacaatcccttttgaaaataaatcacaagagatttcaagcttattgaacaagtaatctaaatcttgcaggtcttggaccttcgtgtctttgagacaggagagtatgcacttgtaagtcagtctccacacaaattgtttattctgtttcataagatgagctaatggattgtgaattttggagactttaggttggatgggttggtatccccaccgcaccagcttggctcccaacagatatgctcatcaaggtactcataattttctcagtacatcaacaatacgtagcattgtcttgatgtcaagtcatgattgtttctgtgttcttggtttttgttccaccgcagtgtgagaaacttgtttacgagcgaatgtagagtcaagaaggttccaagaagaatcctttggaatgcaactgatataccaaggattgtgttaagctgagatgaacgataacaatggcgcaccatcatgatcatgtgttcaagagtttgacaaagtatcaacgttacaattagttacaaaaactgttgtggagtgtggaatatgtcatcagactcctataataagaatgcagcttcagtaaacggatgatggtaattttatctcatcgatctcccaacataaactcatttctcacagcttcataaaatttcctctggttttgtctttggcttccactttccgaaaaccggaaacttcttcatcatcacaaatataactactgacctaatggacggatgatggtaaatttaggtgctctaaacgacgaagacaagcggaagtgtgccaacatgtttcaaattcacctcgtaatcaatgtattatgtatgtgactaggagagtaacaagacacaaagccaatctcatctctcacaacttcattaaacaatcctttcctctgctttgtctttgacttccattttctgataaattcttcatcatcacaaaaatactattgacgtgatggtgatgttagtgggtttcctatgatttctccttttgggttttcccattggtgaacggtgaatgagagaatctagggtttggatttgttctccatacaaggatttaatcccattattatgtatttttcctttttttttttaaagcttttttagattttatttatttttaatcttttggcttattctaaacttttgtattacttccttttcctattaggaataggaaatctaaacattgttataaaaacccgagtcaacaaatcaagagagaaaacaatactcacaatcttaaacaaaccatagtactttttcttctttcaagaattcccacagaatgacagtttctgtttctctagattctctacctgaagaccttcttgtagagatctcttaatgtgttgcagcttcatcattatccgagtttcgcaatcttcaattagtttcgaaatcgtttaaacgtatcagcaacgatcgatacattctgcagcggctttccctcaataaaatccctcttttaccatggcgcaaccgtaaaaaatttcacaattttttcaaaagatgtcgcaagagtggaaacctagaggctatataccgtaaaggacttgtcgattactttcatcgggatagtcatgaacgtcaacgagacagaggactcaaacatatagcaaaaactgcaaacaatggaaatcaagaagcacaatatgtttatgggttgatcctaatttgtcttggtggcaaaacaaaacaaaatggtttcaagatcttgtcttctctacgaaaacctttgatgttgtcaaatacgatcaaggagatggaaaaacatcggacacatatcagaaatatgtggtggtggggcgaaccgatgatgagacacctacaaaaaagctatgttcgtgagaactgcaattgcgatggtcgaaccgagatctttcccaactattgttttcgtcatcgttttggtgaggacgacgacatgcttacttcttccgcttgtgagatatgtttgtgccatcatgaagtcaaacttttctttgctaatattaaggaatgatcttttgatgtatcgaataaaagactaatattggtttatgtgtattatatgattcacaaacatgaatgaaaatttattgccgagatgacaacaatctaattaagcaaaaccacaaaattcttgttcctgatgaaactaaggacaaaactagaaaaaaagtttcatgaaacttttggaacttctttctttctctcttaagctctgtcaagtcctctaaacgacggagacaagggaatagtgccacgaccacgttgctgataacctacttctccactttttttactcgtctttttataatccttcctgcaagctggacaacgtgcttcgttttcactgatcttgttatggcaaaagagacaaatccgaaacccacaagtacatggttcgaattctagatccgttgcatccatcaactcagagcaaataggacattcttcatcaccatcacctctttgcttctcagagttagacctcttcttcttattactgtttctgtgaatcgtcgtctgatttccaggtgcagcttcttgcttgcacttgttcatcctctggcttgtatctggaatcagatcttcttcttcttgctcaaaatcttctgtcacaagtcgagagctttcgttgttatcattctcaaaggagtttaacgcatctttaaacccatcccagttatcataagcatcgtcaaaaacttcttcctcttcctcagtcatctgcttagaacaacaaaagcaatcaccactaacagaatctttcctcttgagaacactcgtgggactactagcaaatgatgatgtcctttcaagatcaatctcatcatcctcatcatcatcataatcaatcctccaagctttttgatcagtcagtttctctaacaaagatctcaatctacgtccaatttcttcttcatctacatttgcttttttccctataccattcacaaacaaattcatcatcatcaacactcgaaagattgaacaaaacttgaaaacttaaagattcaaaggctcttacattgagaaatccattgtttgcgacgagcatcaatcttccactgcttcagcttacaaaaccaattcgcctgcaaatgcacacaagattcgatgcatagattaagaattgacgattatcaaccctaaaaggtatccacatgacaacgaaaaacacggttcttcgaatcacacagaaactggggatttggtattagacgcggatcgattatacttttcttttgaatcaagcgtacatactcggatacaagaaacgaatcgaccgcattaagattggagtgaaattcgaagaacacaccttgcgtttcttggagaaatctgttgaaatcggagagccatgaaagagttcagagtctgtgacagcaaccatgatgatgataatctttgagcaacacacacacacaagcgaaacagagagagagagtaatggcgatgatagaagaaaaaaccctaatacttaaatctggattaagagagagaaatgaaaatcggaaactgctctgctacgctccttctatttctcagtctctcgctcggagaaccaaatgcttgtgtgtacacggtatataaaggatctcgtttgggaaactacccctggtttgacttttaatttacgaaactatacccttggtgatttttgattggctgaaacgacgtcgaattagtggattttttttagtctaatggctttttttggtctgtcaatgaaacttggactacaaggcatgtagactgagtttttttcccataacaagattaggaaaaaaggggatgcattttaaataattaagcaaactagatatatttgttaatgtgtttgtattgataaagaaaataaaataatgaaaaaattaatgaattttgaataataaaggaactaaatacaatagttacctttttagtattattaattaagggaaccttctactgtgtttaaaacacagctcaacaatttactgtagttgatttttaaggtctgtgattcttaattttaagattatctagaaaatatataatgggtttcataaataatcaaaaatattatttgtcttgaatctaagactgttatagattatttagtaaatatatcatgtttccttaaatgatcattaatatattatttatgatcataaaaattcttatattttcacaaaagaattgaaagaataagtcctccgtaagtcttaattactctttacgtagaagtaaagccggtaattatattgaaacggtctttaactttttaaacagaagattgaacaaactcgcatttatagatatcgcaatctcttgagtcaaattatttatttgattaacatttccttatttagtccatgattcatggtcgcaagtccaaatttccatgaataaactttgaccaagtcacaaaaactagtatttgctaaagacttctacgtaagattatttacataggtacgaaatggaagcaatacaatggtagctctttagtcttacaccatccaggtgtaagtaagaattttaaagtttccacctatccttatatattagatgattataaccattttgctggagcatcctactggttgattagttctgctgcaaatctttattctacgagaatggtacaagctgtgcccattaaaatacaataaagaaacatagaacattcagaatcttggacatcatatatatataaacccatcacaatggacaagagtttacacccaaaaccataatgcaacaaaagggcactgctactgatatcagtttttagaccatacactttcaagtttaaaggcaagaaggaaacataataaacttaatatgatatagcaaattagatgtatgtcgatatttactaaccttccaagccacatgtgctaagcatagactacatctctagatgattcactggtaaagctaggcttcagagactccaagtaaccatcgtctttctcaacagtcttctgtttcatgtttctactctcctcaaacgaggaatctccttcaagattacttaagacctccttctttctcttcctcttgaacgtgtacttgatgcaccgatttttactcagtgctaaaactggagtttcttcgcacaaaggagatgcagaaacctccatattctcacagctctctttttcttccttccttgcctctgtttcgctaatctccagctttctgtcattttcatgttccctcggaggagatgttttcaaggatataagagtgccgacatccttctgagaagagtttggagacactattggggcttctccatctttaacagaagatatggagtcagtagcatcagcacaaccagacatttctaagctctctacaattttacaagacgaaacttcgtgaagacatactccatcattcacatctcctacttctacagaggaagacagaaccccattggccatactgctatctactgtgtggatcatctgagctaaaccttcagtttccctgcgttttgtcagtatagatggaagagtgtagtgacattgatccttgttatctttataagaacaccggttaatactatttatgcgagtcaaagacggtacttttatcccattagccaccactgatccattttgttccactgggatgcaaaaacctacagcttctgtgttctcgtgactgcaagaaacctcaggcattacagaaactgcagcatcacggttattccaacagaggttttcctcatgattctttttaagatgtttctgaccatccgtaagtttcttgagctcatcgtgaagtactctcaactccaacctcagctctcctacaatatcttcagcttctccaagctgagcttcaagttcctcaaccttctgttgctgcttcaaggattgcatctctgtctccttaacctataaacacaaatcggttttttaaaaattagagttgaggaggaaacgcaaagccagccacaaaagaaagatatactccattagggaaagctcatcctcaagcaaacgtgatacagtctctaagatgaaaaagctatatcccccacactgaaaaacctttaacttaaaaatttcacgatgaaatgagaattgagagcataagccatgaaatatgtgtaagcctcactgccaacaatggtacaacgaatctagaacttgctgacactaagctacacttggttacgctcattagttttaggccttaggtttcatgaacaaatatcaatggaggaagagaaaagctatatctgcaaagtatcaatgtaatagtctcaagagtgtcaaaaacaatggcttgtatcaacgttcaatgaagtgaatgtagtgaaaaaacatagcaaaaatgatagtctcgaagcatatcatttgaatgatggaagattttagtcacttcaaatgtcaaagactgaataaacaaaactcagagtcacacacacacacacaacattaacaatgcttaaaaccatgaaagcaaggctgaaaaacttaatttcaaaagccatcttcatatgaagcaagaaaaaagaaatgcctctaagaccccaaaaacataatcaggcagaaaccaaataaaacaaaccaagaacccataaacaaatgaaaataagaacaaagtgatagtaccttggaatcaagcatctgtttaagcctaaccaacgtatgaagtgcttcatttctaaccgtcacaagttcttgctgatacctacgcgccttcttctcagaaaccatcacacgtgccgccgcttccttcgtcgtgttcagtatcgtatcggcgtaggctctcttcaacgccgctaaggtctgtgttaacccaaaacaaaacgaacaaaaaatcatcgcaaaccccgaaaagaaaagcaagacaaaacccacatcgtgaaacccaaaatttaaacaaaattagcgaaatcagcaacaagattctgtccgataagagaaacaaggtctagaagaaacagaacgaaactaaacgaagaaaaatccgaaatcgaaaaaaatgaactcgtgagaggaggagattgagggggtttaaggtaattgtacctctgggtctgccattagagccgataatgcgattgcagagaagcgattgttgattttccgaccaaggtcgcgaactcgccaagaagaaagaaaaagctaaaaaggtttttttttttttttttgtttctttttgtgtttccttgaagcgtctgtctgttaggaacagaaagaagtataaagacctatttacccctaaaaactcgatgttatttctcaaacgccacaccacacgtcacgtcagcttcagcatttcagactgcaaacggcggtacggtttcccgttatctccgtcactcttttcgtaatctctcttttgctttttacatttttcggtgataaatttacaatttcaaaatacactggacttttaatttttacctcatttagacaattagaccactagatttcgtagcttttaccccaaacaaaagactatattgtagctagttctaattattgaattttgtatcaactattccaatacgagacatgatataatgttccatatttggtagatacattcaaagaaaaaaaaaatggtagacagctaaaaaagaagctagctcatgggattaaaccaaaattaagatatccaaatgattttgaagtttcgattgcctagaagatggatggacaattaaaccgacttatagaacattgtctagtttacaacatatattaccaatgtaattgtattctactatttactagtgtacactaatactacttttcttgcaattttaggcgccaattttttttgatcgaaaaatatcgagttaaccaattaaaaccgggaagtaatcattaaaccgggtaatgaccgggtgattactcgagactgttatccacaataagaatccacgtgtcttcttcaagcccctccctcttcttccatttttccgccatttcacctagagagcgagcttttgggtgagaaaatctcttcttctaaactattctactgccaatcttaattcgtgcgtttctgtctagagcttggtggtgactagtaacttagccgttaatcttaaatctctgattcaattcaaatcgaattgcgattttcccgagaaaatctcgtttcacttgctggaggatttttgaatccttatgtgaactctagttacccaaaatgaacctagcaattccaaatcccaactcacaccacctctccttcctcatccagaattcaagcttcatcggaaaccggagattcgccgacggcaaccgtctccgtttcctctcaggaggaaatcgtaaaccatgctccttctccggtaaaatcaaagcaaagactaaagatctcgttctcgggaacccctccgtctccgtggagaaaggaaagtacagctacgacgtcgaatcgctgattaacaagctgagcagtctcccaccacgcgggagcatcgccaggtgcttagacatattcaaaaacaagctttcgttgaacgatttcgcactcgtgttcaaagagttcgctggtcgcggcgattggcaaaggtcgcttcgtctcttcaagtatatgcaacggcagatatggtgcaaacctaacgagcatatctacactattatgatctctttgcttggtagagaaggtctactagataaatgtcttgaggtattcgacgaaatgcctagccaaggtgtgtcccgcagcgttttctcttacactgctttgatcaatgcttatggtcgaaatggacggtatgagacttctcttgagcttcttgataggatgaagaatgaaaagatatcacctagtattttgacttacaacactgtgattaatgcttgtgctagaggtggtttagattgggagggtttattgggtttgtttgcagagatgagacatgaggggatacaacctgatatcgtgacttataatacactgcttagtgcttgtgctattagaggtttaggtgatgaggctgaaatggtttttaggactatgaatgatggtgggattgttccggatttaaccacatatagtcatctagttgagacatttgggaagttacgccggctggagaaagtatgtgatcttttaggcgagatggcctccggcggtagtttgccggatatcacttcttataatgtgttgttagaggcatatgcgaaatccgggtctattaaggaggcaatgggggtcttccatcagatgcaagctgcagggtgtacgccgaacgcaaatacatacagtgttttgctgaatttgtttggacagagtgggaggtatgatgatgtgaggcagctttttcttgagatgaaatcaagcaatacggatcctgatgctgctacatataacattttgattgaggtttttggggaaggggggtattttaaggaggtggtaactttgttccatgatatggtggaggagaatattgaaccggacatggagacatatgagggtataatatttgcttgtgggaaggggggacttcacgaagatgctaggaagatcttacaatatatgacagctaacgatatcgtgccaagttccaaggcgtacactggggttattgaagcgtttgggcaggctgctttatatgaagaagcgcttgttgctttcaacaccatgcatgaagtaggaagcaatccaagtattgaaacattccactcactgttatattcgtttgcaaggggaggactggtcaaggagtctgaggcgattttgtccaggttggtggattctggtattcccaggaacagagatacgttcaatgcacagatagaagcgtacaagcaaggaggcaaatttgaagaggctgtgaagacatatgtagatatggagaagtcaagatgcgatcctgatgaaaggacgcttgaggctgttttaagtgtgtattcttttgcgcggcttgttgatgagtgcagagagcagtttgaggagatgaaagcttctgatatactgcccagtatcatgtgctactgtatgatgctagctgtttatgggaagacggagaggttagtgccttcgccagtaatacacggtttctgatgttttcttttgcgtgtatttttatagctcataccttactaagcatgatgatttattccatcatcatagcattttgctctttcagttgccttctgtctatacatggtcaggcatgggggagatatgctagtgtaatgtagcaccctagttaattttcttgcagctaacttgagtgttctggataagcagtaactttagccattgttttgtatataacatcttaagattttaagcaacacttcaaattttttttttggtttataggtgggacgatgtcaatgagttattggaggagatgctttcaaatagagtatcaaatattcatcaagttattgggcaaatgatcaagggagattatgatgatgactcaaattggcagatagtggaatacgtgttggacaaactcaattcagaaggatgtggtttgggaataaggttttacaatgcacttctggatgctttgtggtggctgggccagaaagagcgagctgcaagagtactcaatgaggcaacaaagcgtggacttttccctgagttattccggaaaaacaaacttgtgtggtctgtcgatgtacataggtagcctaagatccctacactggcttcgtttcatgtgtatgaaatggttgagtaccagtcaatctaattcttggttttcaatgttctgcaggatgtcagagggtggcatgtatacagcactatcggtttggctaaatgatataaatgatatgcttttaaagggagatcttcctcaactagctgttgttgtttcagtgtaagtattttgatactgggtacctacctcattgcaagatgccttcaagctttttatcttgccttttgccttttttaattctttctttctaacctctcagacggggacagttggagaaaagctctgctgcaagagaatctcctatcgcgaaagctgctttctccttcttgcaggatcatgtctcgtcctcattttccttcacgggatggaatggaggtcgcattatgtgccagcgatctcagctcaagcagttactgtcaacgaaagagccaacttcagaagaatccgaaaataaaaacctagtggcattagcaaactcgccaatatttgcggctggaacaagagcttcaacaagcagtgacacgaaccacagcggtaaccctacacaacgaagaaccaggacgaaaaaagaactagcagggagcacagcttaagaactagacaacgtagtttctgttgccaagtccagaaatcaaaggcctcttctgccttcctccatatagactggtgggtgaaaactgtgggcgtatttcacaagcactccatatccatgataactatgctatggtttcaagcagtagagtcaacctctgttagacagaagaagctggagaagaagataaatggtgatcttagtttatatgaagaagcgtctatatgaaaatctcaagtaagtagccaactaagtgttttgatggattgttagacccatgattttgcagccatagattttttttcgtttttttttccattcaactatgtttttgattactataaagctaaatgctaatgtaagatcaaagctctagttacaattaaaggatctattaatcaagattcctcagggaagctctagtttttgcttgtgacctcacctgatgaactctctctgtttcgaaatctaacttattacatagcaatgacccaactccacccagaataaagaaaacaatctgttgtgcaagattccttcttcggtctgattaatctttttctctctctcgtcctcagatatgtgtttgttttctgatttaggaaagtcactacaagtttgtcatccaaattggtaataaaataagaaaaagattggagaaagaaaggatcttcctatagtgcttcacacattacaactttaagattccactttgtgtgcgcataaaagtaatggtggctttgctttctaaccgatgctagtgctttgtgtgattttgctgtcttccaaaactatttaccaaattttgtaaatactttttagaatcttttccctacaaatctaaaatagataaataataatagtatgtgatcatattgcttacagtcaaatcacatcctaacattctactaaaagactaaaactatcacctttttgttttttaatgctatatagttgtgatcaagtctggacatacgatcatgctgtttatactacaattaggtccttaacagcgtcttaaaatttactcttagctagaaaacgacaaattcgactacacaatcatttttgttgttgaattagattcctgaaattgtaagtttttgtgttgaaattcaaagttataatttccaaaaaggattcacctgtctcccaagatttttttcttaataatcaactcatagatccacaagatatagtattttagaagaaaaaaaagtacaaggatggagctgtaactaaatagattattagagcagagtacagaatcatttcagaagctgactatttttctaagctcaagttgcatgcgcttaggccttagagacattgcgttgaccagtacattataacctgtagatttttatcataaaaatacatgagggtaacgttaagaaaaataaaagcgtcgatttcatttcatttttctcattctgttatttcatttttttgtatttaactttgagtttgcgaaagtcaataaatatttcttcgttatacgacctacattttttggtcgacatagcgaaatacttttttaacttcttattataggataacatttatttaactcttttttcgtcatcctataagattaattaaactactaacaaaaaacctaataaatctagtcagccaatgaataaaaaaagtctatccaaatgaaaactctgtagagagacaggcaggtaagaaaaaaatacaagaacagacgaataaaaacaaaacacgtgtcatatggtaccgtcaccaacacctacaacatgtaatagtttaaaaaggaaccacgtggcttttggcttataaaagggtccccaaagaagctcagatctaactcacaccactccattgcccattgctctgtgtactttgcttctttaggagaaagaaagcacaaggggcaaaatcggaaagattatcatggccgacggtagtactagttcttcggagtccactaccgcctgcgctggaagcggcacaagaagagagattatgctgttcggagtcagggttgtgcttgacccgatgagaaagtgcgtgagtttgaacaatctgtctgactatgaacagacggcggagactccaaagatcgacggcgaagatagagatgaacaagatatgaacaaaaccccggccggttacgcctcggcggatgaagctcttcccatgtcttcttctaacggcaaaatcgagaggaaacgaggtattactcttcgattgaaacttttttttatcattccataaatttgatcactttaaacttagggatttgttagatatggtttgagaaatggactatgaacaactttatgttcatttggatttagaaagatggctaatttattgggtttctttctatttcttaggagttccatggactgaagaagaacacaagctgttcttgcttgggctgcagagagtcggtaaaggagattggaaaggaatatcaagaaactttgtcaagaccagaacctctacacaagttgctagtcatgctcagaaatacttcctcaggcgaagtaatcttaaccgtcgccgccgaagatctagcctttttgacatgactactgatacggtaaatctctaatcctttgtgactctagtaagttaagtggttaggtttagtttttagcttagttgtttaaaagaaactaatagagagcctttgtgaattgttggttagtgaaaacttaagtataacaaaactgattttgcttggttttgttatcaggtcatacccatggaagaagatcaccaagtgcttatacaggagaacacatctcaatcatcttctcctgtaccggaaatcaacaacttctctatacatccggttatgcaagtctttcccgagttcccggtaccaacagggaatcaatcatacggacagcttacttcatcgaatctcatcaatttggttccattaacttttcagtcaagtccagcaccgctttctctcaacctctcactagcttcatctaatcttaatgaaccatctccttcaatgcatccagcattcaacacgattggagtcgcttagagcttatcctaaaggtgaaaatctgcaacacaccctgtttgtttctttgctgtacagataggtcttgactttgttataaaaaaattcgtcaaatttatgtatttggctaaaaaaaatctgttgaaaagaagaataataaacagagtttggagataggacttaagtggggttttagggttcataatcatcctgtgtttttccttccatgtttggaagttgttgtaatactctctaagttcattcgtgtggatctatcaaaacttataaatcatattaacgttatgtttgttttattcatgatctcaatcataaacagagtcgtagtacttgcttatcatgtggctatctaaatcatgttagatgattcatggggttttagggtttttataatatatctgatttccaaggataagatattttatgtttgtagaataatgtcattatctttaatgatgccaataatgtcaaattttattggtcacttccatcatagtggagctttttcttttcccatcagatgcttttaatatattttgtgtgggatgattacatattacccctgttgcgtaagcaataatcttccaatcacagaacatgatccccattcattaatcgaccaatcaaacagcatcatttttatatgatgatgatgtatatgtgtatgtcatgtgtgtgttggcatgtcctctgtttctgtcgtgtatggttgtattcagttttagcgtcaacgacaaacttctcctcacgtctaagcggggaaaaaaaaaaaaaaaacgaatccagtttatctttgtttgttttgtatctctctgtcttttgacattgtctctaaatttatcaatttcaaatctgcgactatcctttgtttttgggtactttatctcatcaaattccagcccaatctagactctctaaacccagaaatagaaacacaaatcacaaaagattgagatagatagatcatgatctctgttctttgttgatctttgaccaaaattcgatctcctatgtatatacaattgctctgttttttcttgttcttgtttctgcttttacaagccacaatgtctaaacgttctttcaagaaatttgtggaacaagaactcggatctcttcctcatttcctcatctacactgttcttgaatggagcctcattgttttcctcttcatcgacggcgttatcgcctttctgtcaaaccaattcgccaaattcttcgacctcaacattccttgtcttctctgcaccagaatcgaccacattctcgtccctagagaccctcaattctattacaacgagtcaatctgcgactctcacaagaagaaagtatcttctcttgcttattgccatgtccataagaagctctctgagattaaacatatgtgtgaaggatgtcttctctctttcgccaccgagaaagattctgactgtgatacttataagtctctcattggcatcttacataaagatctcgagcttctcattgacgatgaacgagaccttcccttggcgttcaagaaagacgacaatttagtccagacaacaaaaaatctggtggattacaagactaacaacattaaaaatgatagcttgaagcaacattgttcgtgttgtggagaattattgaagataaaatctgagaagttaccgaagaacaacaattctttccttgctcctgctccttctcctagggtatcgcacaacaaactgtctgaaaacgaatctgagtttaaggatatggatgtggaccgaacaccaagttttgtaagaggaggtaacaagttttttgggatccctctgtctgattcggcgcaaaacagtccacgatggtccgttcgatctcttaagaaatccgttttgaataagacagagaatgcttcggacacgacagatccaaccggtgaatccattcttaatcagctcaagaaagaggttcgcttggacaagaagtcactcattgatttatatatggagttagatgaagagagaagtgcttcagctgttgcagccaacgaagcgatggctatgatcacgaggcttcaagccgagaaagctgctgttcaaatggaggctttgcagtaccaaagaatgatggatgaacaagcagagtatgaccaagaagctttgcagtctatgagtagtgaattggcgaagagggaagaggaaatgaaggagcttgaagctgaatttgaggtttacagagagaaatatggatgtttgactgatcaagaagatgcaagggaagagtttcataaacaaaacggcaatgctagtgcatatgatgattgccaagaaaccaaaccagtctcggatttggctgtctcttcttcaaatcagcaggaaaatggcgaaaacatcgatcaaaatgggcaatcgaaaaggtcagaggagtctaccgcggagaatgttgtctctgcagatgaagaaaaaggtatgattctttactcaaagtttgatcattatgtgttgtttaatctgatcctaaaaaccctttttaatcttgtgttgttgttatgaaattgggcagggagtgaaagcaaagaagggatagtaaaagagctttcagagatcacagagagactaagtactcttcaatcaaatggtgatttattgaaacacattgctgatgttttggatgttagtgaaggagaagcaattctattgcagatatctcagaatttgcacatgcttcgtagttttgttgctatgccttctgaatccatgaacttgtaatacaatttttttccatttcttagagaacaagcaagctttcacgccttgtctcaacttgaaaacatttcttttattctttcacattaaaaagtttcagtttgctccatgaacctaacctagtttcagttttgtacttcatacccaaaaaataaaaaagttttcagttttgcatttgtatttagatgtgaaatttttctaaaatgttttcacaatttcaataggtataacattttgagtttgtatttagatgggatttttatattcttacatattttcacatttcaaataggtataacattttcattttccataaacattttgttgagtgtaaatgaatcttaacactgaacataaacaaattatttcgttaaggattgacttttttacaaattttaaatgctaatacaaaatgtaaacataaataaattatatcattttccttcataattcaaattttaaaactaaaactattatatttttatttatagagaacgtacaatcaaatatttcaacttataaatggagacattcgacatttttaatttagtgatcaaggagcgagagttaattgtacctaacttgtttcagccatatatatatcatagctctagccacttgactagctaggtctccgtgagctagggtttattttgaacctaatttattttggcatagccatatatgctttgcttaaaaattgaagccattaaagaattgcataaaattaaacccaacactcataaagatttaatcttttcttgtgttttcctttaatcccatcttattttagtctaatgaagctataaggtcgatccaaaaaaaaactaatctctaatgctatataatctaccaattaacatcgtcatttatcatcatcaaccataatcatctcactcactagcaatggctcatatttcacaaatctcttcttttctctcaatagttttaatcttcctcgcattatgcatcactctcttcacgaaccctactctctcactcccagccctaaaacttaaccctttccaagacttttgtgtagctgatctccaagctaccccaactaacagtggttacccttgcaagtcacaagtcacctctgaagacttcttttattccggcttgaacactcctttaaacacctcgaacccaaaaggtattgccgctaatccagccaatctcttgacctttccaggcctaaacactttgggaatatccatgtataacgttgcaattgcacctggaggatacaaccaacctcactctcaccccggtgtaaccgaggcaggggtcgtgatcgaaggctcggtcttggttgggttcttaacgactaactacacgttgtactcgaaggttattggacccggtgatatgtttgtgattcctccgggactcattcattacgaggggaacgttgggaaaacgcaatgccgtcttttgacggtggttgctgacgacttgcctagcgaggttggtgtgcctcacactctgttggctacgaaacccgcgattccaaacgaggtattgatatcggcgtttaaggcggatagtaaaacaatcaacatgctcaggtcaaagtttactgcttaaaataatggtctctatatggttcctctaaaaatgtaatcttttatgagtttacttaaatgaataacaaaagtcagtgttttttttttatggacaaatctagtaatacttacaatagcaattctattttcatcataataagtccgttaccgttagcctcccaagttcccaactagttaggaaagttttgaaaaaagttaatatatagagaaaaatacaagatgataaacacatcttcttgggttttatttaggaaaaaataaaagccacatatcatctatgttttgcacatgaccaccatcatgatgtgcacttgcaaaaatggttttgatcgttattttgttgatagatcactctctcgaagaactcatgtccccatcccctacttctactatctccttgggatatatctgcatgttaacatgatcgtctatgaaattcttcttacaaagtctaagattcaactcaacgatctatatacagattctttacccaaacaaaaaaagaataaaacctggtggcctttgtcttcgttatgaccgagtgtacggactttgagctcgcctctgctcgttgttaactcgtctagaatctcagcatcacactcttggacccctctcgccgagttattcgactttaaaacagggttaaatcgataaacctcaatcctttaaactactctagacaaatatcaagaataaaaagaatgtacatattatatagacattgactcaccctgaaagacagttcaagcgggtttctaggagttccagggatctcctcatactccgccgcatcgagttcccggagataggctggtttaaagagcttagggagaaggtactgtctgatggctactaaaaggaagaaaagaaccggaaacatgattccggccactggaatccacgtcactccgtagcaaagcccaaagtagagtatctgaaatagcgtgaatgcagcgattgacttatgcggaactttctccacgaacgatgcatgcgctccttccaagaccctaacaacaaaaaacaatcacatgatcagtctttgaaggaaacctttaacaaaaaaacagagcattttcagagcacatacttgaatctccgggttggtgggacgaagagaagtactgttcgttcgaagaattgattgtctgggaggctatcaatggccatgtaagcaaaatatccccatagaagtgaagtcggtatgagcttaatgaccggtagagcaaacactgcacctatcactagcaatgattgcaacaggttgctcactctctgctcgttgactcgaacaggcaagtaagcgtcaacgtgcttctctggatcgaaaccactctcttcgccggtatccccgtcgtcgtcactcttcttcatcactgcctctttcagatcttgcagctcatttatcagtgttgtgtgtgtctcagcctgtagattaaaaataagagctcatatcttgaaaactggaacattaattatgagtctactacttacaagtgggcttttgtccatttctatgaagacttgttccatatcctcgtacacttgagaggacgttgctttctgtctgatgctttctttggctgtcatcaccatcttcctccgcattaactgtatagaaccaccaagtttcatctagaccgcttaacctgaatattcagtgttgattaactgagtattaattagacctgtcgtttgaaaacagctaggcttttggtatgcataggagactgcgggaggactccgttggaaggcggtagaccgagcattccacagatcaatacctgaaaaaaaaaacacagtttggagattttaacagagaattaatgttagcttgcagaggaagaaacagagtttgattgattaccatgaaacctaacaagagaatgtcgtagtgatatgcagaagggttcttgaggttaaactccttctgctgcgcgagctgcgagacaacgctgtggtcaaagaagtagaggcctgcgatcatcaatgcgggtataaacgctgcaaatatgtaaccgggagagactttacccatgtcctgtacagaaaaaagacggatcctaaagaggtttggattgtaaaccaaaatcttaaatgtagttgtgttttgtaaccttgatgacagtccaatgtgttaaagaaacagagtcccatggaagaggactaacgagtcttctcgggacaccagagggtagttttgatggcgtactgaaagacaatgctgtccaaaccacaaccatcaacggaactccgtagtctgcaacgaagcttcggcaacatcctttacaaagaatcataatattaaggccttgtagttgtttttaaacagaaattaccattaagcatgagaaaataaatcactcttacctgttccgtatggccaagaccttgcttttctgctcttcaaagcggtgtagacaagaccgactgtgaaaataaggccaagaagtccgtttgtgtagagccactcaaactgatacttttcaagttttgagtcttcaccttttggaatcctaaattcactcaccattccctaccaatatcatttgaaacatataaaagatcttttgacctatcatcagaagtgagaggtggctttgttgagccttttggtattgatacctttatggtttgttggagaaatagaacagcgatcaacataccaaacagctcaccagcgatcctcgtgaaccggttgatgatataagccatgttgaatatcgccattaggaatagtaacaaagccgtccacacacaaacccttcaattaaaaaacaagcaagaccataactcttacaggaaaacatttacaagaacaaacgatttagagttttggagtaatcaccaagcaacccaagctaagtagagttgtttgcccaattcaggtcttcctttagcgaagtcgtacaagtatttgtacattaagacagttggttctgcaactccaagtatcaacaatggttgtcctcccaataacgagtgtatcactccacataacgctgttgatgctaacgtttccactgtgctcaacgatctctctatacttttaccccaaattttaaatcagattacgcataactaaaaacaagaccaaaacgtacatgaaggtaacaaatttgagagatagacctgtgtcgtggctaagttgctcgccaaaggcaataacaggaagcgcagaggcgaagaaaacatatgttgtcggtgctaaaatcctgtaaaacctctcaaaaaacatataattacaatttgtttctctatctcaagaagaatctaattataagtacccgaaaccagaacgtagaccagcgatccagtcttgcttgtaacacaaggctcttcctttgacatctcttatgataccttgaaatggccttttcgagccttccactctttcttcctccatatcccctcaaatcactcggagattctaaaccacgtcgctctgatcagatgttagcctttgcaacaggtctttatatgacctaaccacacacaaaggaagttatataacacatataaatgacttcatatcgtgtagttttttttatgatgtagtctttttttcacccactatgtagagaagaatctcaaagtctttatgttttttgggtactttagtagctgaaaataggaaaacgctatgtgcttatctgaattagacaaacatcgcaatgcacaaaacaagcaaaaagaaatgaaattttccttttatgacaaagaaaatctgaaattgcatatgtacccaaaattattaagaatctaattctttcattaaactccactgattaaaatgcatcgtgaatctaatccacaaaaaaaacttttttaatacggtctgacatcgaaattatatgttatgaactctttaatatctcacgaaaacaaaatcagagaaagaaagaatgaaacatgcaatatactaagtgatgttaaagtattacaaagagaccaagcaaacaagtgtggccgcagagagagcgaaaatcaccggagccgacgatcatatgtggcactggcaagtggcaacggtcatctttatacatggagaggaggagacacacttgtacacgtcttctggtggtctactgccacgtggcagtattcaaatggtggattttatacatccgtgaatcttggagttgattttccttaatttaaatggtcgtactaccgacagccaaaaacttgtctttcaccaacaaatatgttttggaaggctgaatatcatcacacaaacaaaataaaaaactaacatttattttgtatgaaactacatcttttatttctgttcagaattttcgaaaccgttgaatttgtttgtcgattggaaataactagtgaacgtacgtaactcgaggattaattattaaacaaattcaagtattaaaaaaaatggacaatgcatgtttttctttacttttgaattttattttttatgatcacgattttacgtttgattcaatttctcatattacatgctactattgacaatatttatatttttcttattataacaatatcttttttcttttctttttttaacaatatctttttttttaacaatatcttattttaaacatctttaatttgtatgaacacaaatagatacatgaatatttctacgcgtgtgttaatttcctatttttgtgaaacaatatcaacgtctccgcgaatgcgttgaatataagtcatgattttatatatttttttatggttttgaacccacatctgatatctaagtgaagtatagcattctataaaatgtaactaaactttagatcatcgagtgttatcatgagtaacgtaaatgaaatacttaagttagataattacatacacaagggtggtagatcatctcattttgaaaaacaaaaaggaattacaagaattgaataataaaaccattaagtgagataaatacatgcacatgggtggtagatcgcataataaacgccgtacgatggatgagtattaaaaaaacaatgaaaatgcagctttggagttagaactcgagattcaaaatccaactattggtaaatctcaagtgattaatgcattattttgaagttatgatcgttgtcagtactattgattatgtagcctttaatgtatgcttaagaatatgaaggtttttcttagcttgtttcttaattttgaatacgtaacaaccattgttgtctccgcgagtccttgtctgcgtttagcaacatgttgatcaaggggatcttgattgtgagcgtataacaaccatcgttgttttgttctcttctataaatgatcttctaatctcacttttctttttccgttcgtttttctataacaaaaaattaacgtcaaggactcaaggggatttgaacgtttgacttttgatatttagatgaggaatggggagagactggtgactttcaaagttgttacgtggctaattaactcccctaggatttgtgggagaatccaaatcacgatcgatttttgctcaaaggagctgaatataagatggatagcaaagatacaaaataaaataactcagtaagagctttatttagtgcaaggggaaataaagaacgctaagcttaatcagtaaatcttagattgatgtcttgaaatgatgaagaaggagagttgtggatagtggctggcaacttccaaaattagctacattgatgcttataagttataacaacatatttctgtgaatctaaacttgctagaaatttctaattacatggttttgcgggcttctaattgaatcataattgggcttcttgtgaattctctaaatgcttcaaaatgaatttggatttaacaactctatccaaacaaacctcagcaaagccgtacgttctagctttttaaggtatcttcagtgcagattgtgtatatactgactgtaagaacaagaaatttataatgtagtatgtaataactccaaaaacattcatcaagctaaggaaaataatcaataatgggatgtcttgtctacttcttcaagcccattgaagaaggcacggatgggcccatacgaaaagatttttaacaagtctagccttcaaatttcctaatggctaattaaatagtttttattagataatgaccatgttctttgattgatcgctacgtcagctacctgcgatctaaaaaaagctctcatctctctttcacttttatttttcctctctttcatctttgccgcagcgactgtaattcggctattccgtagacgctggaattttcaacgtctcaaattccctttctcctatctcttcagatctatcgctgcgactctttcattcatctcaccttcatctttccttcttttttcttttatattttgtgccgccggtgcttgtcgcagcgatcaacaaaagaataaggtaaatattcattttgggtagtataatatacagtagtgagacatgggcttatgtcacatacactcacatgtgtcacacatacacctatttttgattattttagtcttgtttgtgtccattggaccttgagagaatcataattcattatctgtatcatgaagatttcaattcaagaatttatattcttacaggtccattactcaaaaacaaaaaagtaaagaaaaagagagcgagataaaatgatttcaatgaaaaataatttgaaaaagaaataattaataataaatatattgtactaacatacgcccaaaaattccactatagcgtatctcaagattcaagatctccttcttcttcagctctcgtcatcatcattctctgcttcttttcatttgctcctgttaacaaatttgccaactttcttccattttcgaatccctcttaacgcaaagttaggttttttgttaattcatttcattgcttggatcctaaggaaaaaaaaaacagaaatgaaaaaacccaaattgtcgaaagtggaaaaaatcgacaagattgatctgttctcttcactatggaagcagagatcggttcgtgtaataatggcaatagggtttctctatcttgtaattgtctcagtagagatacctctcgttttcaaatcctggtccagcagctccgtgcctcttgatgctctttctcgactcgagaagctcaataacgagcaagagccccaagtcgagattatccctaatcctccattggagccagtttcgtacccggtttcgaacccgaccattgttacccggacggaccttgttcagaacaaggtccgtgaacatcatcggggtgttctctcaagtttgagatttgattcggaaactttcgacccgagtagtaaagacgggtcagtggagcttcacaagtcagctaaggaagcttggcagctaggtcgcaagctatggaaggagcttgaatctggaaggcttgagaaactagtggagaagccagagaagaacaaaccggattcatgtccacattctgtttcgctaaccgggtctgagtttatgaaccgggagaacaaattgatggagctgccgtgtggtttgacattgggttcacacataactttggtggggaggccgaggaaagctcatcccaaggaaggagattggtctaagttggtgtctcagtttgtgatagagcttcaaggtttgaagactgttgaaggagaggatcctcctaggattctgcatttcaatccgaggcttaagggagattggagcaaaaaaccggtgattgagcagaatagttgctataggatgcaatggggacctgcacaacgttgcgaaggatggaagtcaagagatgatgaagagactggtgagttctattcctttgttacttggtatctgtattttgtagtgattcattagaagctagcaaatggttaggttgcaagttatggttcttgtcatctgttgagtaatactttagtgtggctgcagttgatagtcatgtgaagtgtgaaaaatggattcgtgatgatgacaattactcagaagggtcgagggcaagatggtggttgaatagacttataggaaggaggaaaagggtcaaagtagaatggccgtttccttttgtggaagagaagctgttcgttctaactcttagcgccggtttagagggttaccatatcaatgttgatggaaagcatgttacttctttcccttatcgcactgtgagtatatattctactccttttctacatgattgtgtgttcagataaatggtttattcatgcaatccataatagttcagagcgtagaacgagttggttagtaattctttgttatatataatagggtttcacccttgaggatgcaacagggctaacagtaaacggagacattgatgtccattctgtttttgttgcctctctgccaacatcacatcctagttttgctccccaaaggcatctcgaattgtcaaagagatggcaggctcctgtagttcccgatgggcctgtggagatctttataggcattctttccgcaggcaatcatttctctgagcggatggctgtgaggaaatcctggatgcagcatgttcttattacatctgcaaaagttgttgctcgtttctttgtggcgctggtaagctggatttttacatgtttatcaagtcttaaggcatgaaggcttgtttagaaaaaactgaaaaagaaaagtcatgagggcttaatagtacagagacaaagtttgatttgagaatcatcaaaatgcaactgttacctgaacagattttttttattttttttctccgtgatgtgcatttcacagcatgggaggaaggaggtgaatgtggaattgaagaaagaagcggagtattttggggacattgtacttgttccttacatggatagctatgatcttgtcgtgctgaaaactgttgccatatgtgaacacggagtgagtatcatattttatataggtcatgcttctgcataatcgttcctgatttagtgtttctgtggagttgattgttgaatttttgttgacttcgattgctacaggctcttgcattctctgcaaagtacataatgaagtgtgacgatgatacatttgtaaaacttggcgcggtgatcaatgaagtgaaaaaagtacccgaaggtagaagcctgtacattggtaacatgaattattaccacaaacctctccgtgggggtaaatgggcagtcacatatgaggtacattttttctgcatcacactccatctttatatgcagccttttggatgaactagtgcggcgcttttaagtgtcagttctgtgaatactttaagactggcactcattattaatgtatatatcttgtggattatatcaggaatggccagaggaggactatccgccctacgcaaatggacccggatatgttctatcttctgacattgcgcgcttcatcgtggacaagtttgagagacataaattacgggtaagcaaaagagagattcaaaccaattgtatcatcttctttccacttctcattctctgttgttcacatataccagctgttcaagatggaggacgtgagtgtgggaatgtgggttgagcatttcaagaacacaacaaacccagtggattacagacacagtctgagattctgccagtttggttgtgttgagaactactacacagctcattaccagtcgccaagacagatgatatgcttatgggataagctcttaagacagaacaagcctgagtgttgtaacatgagatgatgatacttgaggaaacagttgcattttctgagatctaatatgccatcaagcttgctgtagaaagccaggaaaattttgcaagcgtaccacacagagagagaaagagagccaggacttggttcgattggtctgcagccttctgatctgttaaagaaatggagagaacatggagtagggaagaacacgtagggaatttactttatttttatttgtataaacccatttcttaatctaaatggaaatttgttttctctctgtctttcacaacatgatcaacacagagcaaaaaacagtttctggcctaattactcataaaattggctctgagggaatattacaacaacagccagatcagacgatggcaaaggaaagcctctatctgcttatgaattgtctgtgtcgttatcatcacccttaagtactataatctaaggatttgtgtatcgttggtctcattcatcatacatgtattgtgttctctcaaaagatcctgaacatacaatctcataataattcttcaacacaaacaagaaacaacttttgcaaattagtttaataaacctagcagaatcaaagacagagacacaaacaaaaccaccaagcttccatggaaaccatttatatgcttataacaagaagacgatgaagaagaaggagaacttgaggtaccggggtttcttctagctgtggagttttccttggagcaagtcaagttgcaacggctcggccttactactctatagacaccattgcttgtgagcaagtagatgtctttgttgttatcctcaccaaaggagaagacataccctagggagagccctgaagttcccggggaatcactacatttcatgggtgagtcactggcacagctgaaggttgttcttttggtcacaaagctcccgctattagcaggcgtttcaatccccgcccacacgccatttccatatagatcagcatatacgtacctgcaaaagaaaaacattattttttgcaagatgttttgttatcatatacatgtgagaggaacaatagataaggaaccagagaaagagtgtgtgttagctcaccttccagctatgcaaggatcagtttcagatctataaaagtaacctccagtgattgaagctgattttccgcttgagtcaacttctgagtggttgtaacccatcacaggaaatatcgggtttagtgatttaacagatgtgtttcctccaggggatgactcaggatggaaaagatccgggccttcgtaaacacgccaaccatagtttcctcctttgcttatgagatccacctcttcatatgtgtcctattaaacaacaaacatatcaagaacggtgcaaacaaaataaaaagaaaaactcattgtcgaaacaagcttacctgtccaacatcagcacacatgaagtaagaaggcctagaagaatcaaagctgcatctccaagggtttctcaatccaacagcccatatttcaggttcaagctctttgtcttcacgaaaagggttgtcttttggtatagagtagtttccccatagacccattttggagatctcagaagcacctgaagacatttgtggatcttggtaaatgacaaaggacactcatataatgctactgtaatgcatcacatgttgcagattcagttactacacaaacaaaagccaacgtatacccactaggaatgttatctacatcaagcctcatgatctttcctagcaaagatttcttgttctgtgcgaaattatacgggtctgctcctccacctccatctcccatcataaagtataggtacccatctggaccaaagagaatctgtccagcatggtgtgatgtgaagggaagtcccattgtgaaaatcctcctgacttctgttggcttagcgttctttgcctgaacagcgagaaaaaaaagcttggggctctatgacaaacgcaaaagttttagatactgaaaaggggtcaaggagagtatataccttagaagggtctgacgaggtagaattggctgtatactcagctattacggtttggtattggcatggttgagatccactgtcaggagttagtttggaaggatcacagttcacatcggagttacatgagcaccttccagtacagcctggccacttggacttatcgcagttgaaagaagcgaaaaaacgcccattttgagcaaactttggatgaaaagccattcccatcatcccaaactcagtatcaaaatgaatctcatcagtcatatccacaaatgggctagatggatccacatccaaaaccccgccagaatcttgatccggtataccagccaagaatactattccaggttgcgtagagaagaatgcacggttggagccatcagggtgaggaaccatgttgaggtaagaaccgtttccaattttctcaaggcatataccagaaggcggcttgtcaggagtagtatcattgtcattaagagcaactggctcaccgctgaagcaaacagtttcattggagctagctccaccaaaggcactgcagaaatcggttttggactgccatagatcagcaagcttggaggcatttttatttgacggcgctccagctcggccttgtaatgaggcagcgaaaagagaacccgatatggagacgttttgacatgtctcccatgtctcagagcaaaaattctctgtggaatttgctgaactggtcgagttgcagaggattggaacagactgctgatctgagttatctctgaataagtctgatgaaaaaggatcgcaattctgtaacatcaacacagtaatgaaacaaaaacaaaaaaaaacttagaacacagttcctcttctatagattcattctcagacaaaaacattacaatggttccagacaaatcaggtaagaatggtaacagctcaaagcaaattatgtatgagtggcataatgaaacacttgcagaatctttagggattaaagacggagattatacttacagcacaaaggattgattttacaacagaagcacaacccttgtcggaaatgttcatagcttgaaattgcttcatcaaactggtatctttcattgtattgcagcatgtttttcctttgtaaggacaaaagctcaatgtcgaattcacctccgagggagctcctgaaaaaccatcaaaaaacaaaatgttgcatcaatctacaatagcagaactaatatcaaatcaataggataacaaaaaaaaatcactcacttgaatcggaacagagaggaagagcccatgaagaaagagcaaaacatgagaggaacaagaaaaggaacacaagaaattgatgaagcttcatcgagtctcgcaagagacaaatcttgaagataatgacagtggaagagagaatcaagagagaagaagaaaagaagtctcttttttatacatctgatctcaggacaagacaagagaagagagataggactgaaaatcaaataataaaattagtttgtttgactctgcagacagaataaatgcaattgcgatggcgtttactgtcttcccatgactaccaacaaccatatccccagaaatctcccttctcatataataattaatgaatataatcatgttcaacttgaatttttcaactttctcgtgtcagagagagagacgatgaacaaaggttctgtctttttctatgctttgctagcttttgattattgtcctcagatgtgatagtcaaagtagttgactttatacatttgggttttggatttctaggaacttattggggttcgaaaagtaggtttgaagttggtagaacaaaggaaaaaaggacttgtcttcttcaagttctcttcccatttaagactgcaaaactactttttattccaaaccataactttctattgattaacaaagtaatttatgtggaaatgatcaaaagtataattgaaaacgcattgaataagagtgttggtgcatggagattggtttgtggattaatctgaataatgaatgaacgagacttgatggcctgcaaattattactatttaaatgcatagtagtcaacaatatgaattttaaaaaatttcaacattattgggaactttgagatgtctatacaattcacaaaactcacatttttggaagaaactacaaaaagaaagagagacaaagatctcagctttctttcttcccatctctaaacacagacatttgatacaaacataacttacaatcaaacttataggtaaagaaattgatgtgtacctttggaagcataagctaccatggatgtagcaagagaagcagtattcgtttttctccaaaagtatagtattcacaagaactctatcgatgatgcaacctctttacaaggatctgtcgatatagcgtctttgtccgaaagaatagtacaatggcgacaagaaacccaaagaacgcaacagatgccattataataaatgacagcctgaagcaatgagagccataacatgtgttcccttccccggaagcagtcttatcgtagatataaccgatcaatcttacagagaagatataggaaccaatgggactagccacggatatggtattgaagatggttcccatgtgccgaatcccgaacagctcagaggtgattgtaggcatcagagaccactgtgaaccataacaaacgccaactataacagaaccaacatagagatttccttgaaaaccagaggctatgattaggtggcctatgctcatcgttccaagtgttgcagccattagcaatggacgtggccatccctttttgtgtagcaatgcatctgaggcataaccagctccaaatctaccgagaaagttccatatactccacaaggagaccaatgaatttatctcaactgatgagtatcgaagagactcacctatttgtcggatgttgtttatcgttgaaagtccagagcccattccgcaaatcatggcaagaaataacaaccagaagcttagttttttcatagcttgcagaagattcaggttctcactcagtccagcttccactttactgtcaccttcagaactttggttaccggaggttgttgcctttggactgcttatgagaggggaataatcatgtggtactgttttttccatgccgtctcgttgtgctcttctcgcaataagtagaggcaaggcaagcatgacgagtagacatacaagtgtgacaatgttggcccacgatgacaacccaaaagtgttcttcaatatgataatgatcataagataagctgcgatgattagagatacagctgaaagaccatttaaatgctttttatcatcggctacgcttgtctcatagatcctgaccagaggcatgaccaagagtgagagcactgttggtgttactgccagtaagagaatgaagctggccggatctccagcgcacaatgtctcgtacagttgaatcagtatcgctccacttagaccaagaaaaccctgcaaagaaagaattagaggtaagcttggatgcttcactataatcaaaaattccaaagttgaaaccatgaatctcccactattaacatactttggggtttagttgaagtttctcatcttaaaagtggaggttgcatcctcatttgcaaggtttatcagaaaagaacaaatatttactacgcaatatatatcaactagaagatctagatctcgattgatccaaagttcaaagcatcaatctctttccaaatgttaccaaagcctcctcatttagactctaccaggatcatcatcatagccaaatattggtctttaggtcccaaggaaacaaactgagacgtgatccaacaatacagatccattcaatatatcgaaaagcttcatcaaaaactcaccttcataatgccaacggctgtaccaccatagtcagcgaaattctcaacggcactaacaacattagccgtattgaagaacgtttgcgactgagctgctaagaacataaacaggcacatcagcggcaccggaggctttctaataagtccggtaacagaagcccaaatgagaaagtaaccggcgaagcactgaattgccccaacagcaagcaccacccaaggtcctccagcgcctccaattcctcctccccgtccacggagacgattggacgtagcgtatgtgtataaaagcccagagaaaactccggcgtttgctccgatgtccttgaagactgagacggtatcgagggtggattgatcgtacgattgagtcgattttaggacagcggaatagattccgaaggtgtaggaagcgccgcttgcgcattgtatccatatactagctgtcatagccacccatttcgttcttagtatctccatcgccgccaattaccaccaccttcctcgccggaaaaaaagagaaagccagagctttttcccctgctcaaggacgacgaagcgacacgatcacaaaacttttttttctttttttctttattcaaacagattgattttggaaaaactatttaaaccttaatgggctggaaaaattggtatgggctcattagttatagaactcgtagtattgattttgtgagcccaattaactggaatgacacgtggagtcagatggagagcacacgacagccacaagacggcttgtggaagagagaagacggaacgaggttaattaacggattaaactaacggagtcaacgttgactggtcaaggagtattgagaaaactgtacggccggccaaggtcacgccactctctcgaccaatggttttataatcacgaggctgactcagctaatctcccgcaaatcacgagatttttcaatgttactcaattacaaaactattaacaaactcaatactacaaaatcatgtaatgtgattatttagttagtcggatcactaattaatgttttttcatgcattatactatggtcaacgacgttggagaagtaatcttgaatacttgacaacaaccaaaatattgattctttttttcctctcataaaaaaataatgtttaacaattgtaaatgatctaatatattatctccattcttgttagattaatttaatttatctctgttcatattttcacaatctaaatttcttttaaaaataatataaatgaaaacaaattagttagttaccaaagaaacagagacaaaacagatatttaaatatacatcccgccataaatatgatataagctatagttggttttcagctgcaacgtctcagtcacttctaatataataaaactcaaaatctcaaattgattaaacaaactggcttacgcagaagagtgacgactacgaaaatgtatcatgcctttaaaaaccttctctactcctttaatcggttccttcttctttcccttttctcctttcgcttcacgacgacgaaatttttgatttcagtcaccgttattgttgttgcggtggatgggaggcggaaatcttcattcccttccgccggaaaacgcttccgtttctgcatcttatgcggtgaccgttggaaataccaagctttctgatgctccggttcttttcttcgtttactgccacaaggctttccgtgctcagctggtggagctccggcgtttcgctactgacgctgctgaagccgattcctttagtggggatctggcggtggagctctcccggaagtttgagttcttgaagcttgtatataagtatcatagcgcagctgaagatgaggttagattttatcacctttataagtttttttttccctaaatgagttgctctgttttaatctctgttactcctctttatgttcacaaattaaattcgagtttagaactctcttgcttcctgaagctaattacaactagagaaataaagattgtcctttgaattcttggttagactaggttactagggtaaaagaccttgtctaaattcgtgttgcagtctctagtttcagtttgtgaatcttttattgatgtcaagaatctgactcttagattgaaatccttatcatgataagtaacagtggcttttgatatgcttttcttactggcaggttatatttttggcgctagataaacgagtgaaaaacatagtttctaattactcacttgagcatgctggcacagatgatctctttacctcaattttccactggctacatgttcttgaagaagaaataggaagtagaagcgatgtacttcgtgaagttattttatgcataggcaccatccagtcatctatatgccaacatatgcttaaagaagagcggcaggtatatagtcttgttatacttcaactctgttttgacaactacaatactttttaatggaaaacaacatttcagttacagatactctatcacttttcatagtggtgcctaacgagtcatgcttcatgtaggtgtttcctttgttaatagagaagttttctttccgagaacaagcatcacttgtgtggcaattcatttgtagtgttccagtgatggtgcttgaagactttttgccatggatgatctctcatctctctcacgaggagaaaattgaagttgagaattgtataaaagatgttgccccaaatgaagactcattgcaacaggtatacatatcccctttgctgagatatgctatgtttttcttctttccttttgataagctaaaattttctgaaggtcataagctcttggctgcttgacgatagtcaatcttcttgtgggactcctacagagatcatgaaaggagtccagtatgttaatgtgtctaaaagtttgaagaaatcacctgagtcacatccgtcaagcggatgttttcaacgcttttgggagtggagtaaaaagtccctttcaattccaaatgtaggacggagcccaattcatggtcttagactttttcaaaatgcaattgaaaaagatttgagagatattcaagaaggattatgccaagcaaaattccaaacccttattttggatcttgatgtactgatggctagattaaacttccttgctgatgtccttgtttcttataggtaataatagtttctcggattaacttaatttttctctttggtatagtgtctagtctcttgtttactttccttccttctttctttgagtgagttacagaatgttttgttttgttttgttgcagcaatgcatttaagaagttctttcacccagtgttagaagaaatgacagctcgccgctcttcaactgccaaacagttcaacatagatgattgtcttgagaattttcagagattgttatacaaaagtgctgatgataaaacaaagacggacaattttctattgcagcttcaggaggaacttgagtcccttataatccaagtaacaaagcaatttgccatacagagaacagaggtaaactcttatgatacttactcgtttctataacataatggaagtttttcacggattcattttgaagatgttacattgtgtgtatattatattcaattgtctcattgttgtccaggtattcccaatcatcagcaagaattgcaaccatgaaatgcagaagcagctcctatacacaagcattcatgtcttacctcttggattactaaagtgtgtcatactttggttttctgctcatttatcagaagaagaatctcaatccattcttcatttcttaagtttggaagattcttctcccaagaaatcatttccacgcctcttgctacagtggcttcgttttggctattcaggcaaaacctctgttgaaagattttggaaacagttggatgttatgttcaaagtaagatgttcctgccaaaaggagcacactgaagaagcatcaggatcattttccaaccaaacacagctgcaactatgtaaagtatctaaagatgtttatcctagaaagaaagataagtcttcaacctgcttcatgtcaatggatctagctgttggagacatgtatgagacaccttactcaagtcgaatgaatcaacaaatgactttctcaggaaagcttaagcctcctctccatctcccagatttttttggtgagaagaatatggatgatcctatgattatggatgttaaaccaattgacctccttttcttcttccacaaggcaatgaagatggatttggactaccttgtttgtggatcaacaagattggcagccgactttcgtttcctcgcggagtttcagcaacggttccatatgataaagtttttgtatcagatacattctgatgcagaagatgagattgcatttccagcattggaagccaagggacagctaaaaaacattagtcactcgtttagcattgatcatgagctagaaactaaacacttcgacaaagtttcgttcattttgaatgagatgtcagagctgaacatgttggtttctaccatcaataccactgcagctgaccacgaccgaaaaatgaagtatgagcggttatgtctcagtctccgagagatttgcaaatcaatgcacaagctattgtctgagcatatccaacatgaagaaactgagctttggggtctattcaggaactgcttctctattgaagaacaagagaaaatcataggatgcatgctcgggagaataagtggggaaatattgcaggatatgattccttggttaatggaatctttaacctctgatgaacagcttgccgcgatgtccttgtggcgccaagcaacaaggaaaacaatgtttgtcgaatggctaacagaatggtataacggtcatgttttacaagaggaagcaggagaagcaaacaacgatccatttggggattcagatccactagagattgtctggaagtatctctttgaagcatctgctgatggggaaaaagggagcatgcgcagcagccttctcaaactcccgaagacgaattttacaggtattatgaatcagcctcctcctaattacaaggttgaagttggcaaaaaagaggaaaaagatctagaacggtcagaaagtaaaaagatatgcagaggatctaaccaagagggggacaaagaacaaactgacaaaatgtctcagaaggttagccagtttggtccatccaagaaatatgaacaactgttaacaatgagtgaagaagaacttgtggttgtgattaagaaaatatcatgcgactcttccctggatcctcagaagaaagactatatcaagcagaacttgttaatgaggtaagctctactaactctcttttggtgtcctgttccaacatatttagataagcaggaaatctatttagtcttgtattgagactaaactaatgtcaggttcttctttcagtcggtggaatatctcacaacgtacatataatttggaaccatcctctctctcgagcaacatggaaacagttcatggtcaacatccatcatatcgagatcctcacagtttgatctttggttgcaatcactacaagagaaattgtaaacttcttgctccttgttgtgacaagctcttcacatgtatacgatgccatgatgaagaagctgatcactcggtggataggtagtaatatcttctactttcatacaaggagcttcaacaatcttgttgtgtctttaatcatctctagttctcttgaatttttcatgcaggaaacagattacaaagatgatgtgcatgaaatgcctcttgattcaaccgattggtgcaaattgctcaaatacttcgtgcaagtcgtcaatgggaaaatacttctgcaaaatatgcaaattatatgacgatgaaaggtaacgtttcttcccctgcttcatcttttcttgcaagttataaaactatgaaatgaaatatcgttcttgtgctttctttctaagtatcggtagagggttaacagtcaaagcttattcataacaggaaaatttatcactgtccttactgcaacctctgtcgagtagggaaaggattgggtattgactacttccactgcatgaaatgcaatgcttgtatgtcacgtaccttagtagagcatgtttgcagggaaaagtgcttagaagataattgtccgatttgccatgagtatatcttcacctccagctccccagtgaaggctcttccttgtggtcacttgatgcactccacatgctttcaggtacttaaccctgtcaaaatatattttacgttagtaatgaaaaaagtaaaacacatggtaatgctaagattacttaggcttttttctttgattctggttgtaggagtacacatgttcacattacacatgccctgtctgcagcaagtcgcttggagatatgcaggtcagttacaccattttaaagcagagtattgttttccctataaaacattcactaaacaaaaacctttctcacacaggtctactttaagatgttagacgcattgcttgcagaagagaagatgcctgatgaatactccaacaaaactcaggtttagatctttctctatctctcttcataatgtttacatagtacaaagcatctctctgaagaataagctgaatggaaaaatggtttggtgcaggtgatcttgtgtaatgattgtggaagaaaaggaaatgctccttaccattggctttaccacaaatgcacaacctgtggctcctacaactcaaggctcctttagatttttctccaattttccttttccattgacatcattgtagaaccagccgtctatgtagtacatggctggtaagaaaacatttttgtaacatttgatgatgtacaaaaataaaatataaaaaatattccaaatgtaataaattagggtcgtatcaccctcaaagattgaattatataatgttgacatgagaacaaaaatctggagacaaattccagtcatcaataaccttaaacttatgacctacaaaaccaaaccattgagattccgccaaaagatcaaaaaaaataagaggccttaaaagaagaaaacaaaacaactaatctacaactaaagcaaatgcatcctctcaacatatgattcaagcaaccaattcttgagaggctctccgcttcctacaaaacagcctgagttcccgttctcagtgaaaaacgggaagttgaatatgttgagcaattcctcaactgcttgtctaaccatcgacgtgcctgtgactctacttcgtcttccccaaccagttactatatcaatccgtgaaggacagtctcctgaaaccaacatctgcttacggaaccatgcaagtgtcctggaaagtgcgatgactgcagttccttccgacattacatggagatttataagccaatagctgtagcttttctccctcaatgcatctggatacacattcttacctgcagccacttcccataccgagccagcctcttcttttagacctgacttgtggagaaaatccactactgcgtccatgagtcctcgcttgctctctctgtcctcactgtgcataaaatcaaggaagttgctgacatgatcacgcactttttggccatcaggacctgcaggtggcattttgagcagaaacatgtgagccggatgacctgagactgccattagctggccacaaaagcccatgtcaaagtttgaacgagcatctgtgcaacaactcaatagcaatgtgtatgtctgcaaagaaggatgtagaccaagcgccagcatgctttgtaataagttataggcttcagacatcctgtggaccctaaggaaagtgctgagaagggaattgcaggtgggaacattaggtcgcagaccggcttgaagcattgcttgataccactgccaagctttatctacattgccagcttttccccacaagtccaccaaaagaccgtaaaccggttcatcaggaacccagttcttacgttgcatctcagcgaaaacaccctctgcttcctcgagaaatccacagtgtccaagtacctccataacaatactgtaggtcactttgtcaggttgaaacccggcattttgcatgtctctgtagagcttcaacgcagtctcataattccgcgccttggcatgcaaagctatcatgatgttgaatgtgaccaaattaggagtacaaccttgaccaaccatttcacaaaagagcctatgggcagcaggtaaatggcccgcttttccaagacagtttattataacactgtaggtgaaggtatcaggagaaagccctgcttcttgcattctttggtacatatccatggcaatgtcaagaaatccagctttagcatggatatctatcagggtacagtaagttacacggtcaggctcacaaccagcctcttgcatctgattaaaaacattcatcgcttctttgaggtaatttgcacgcccgtagctatggatgagtcggttatatgtaacagtatttggcttacacccatccctaaccatctcatcaagaagcttgtttatctcaccgaattgctttgcacgaccaagattacctaccatagtggtatacgtatgcccatcatgcttgaacccaggttgccttttcagccaatagaagaaaccaagcgcattcgcataattatccatctgcttaagaacttgattagcttggtatgcatccatcctgaaaccaaaattgtgaagggcctcttcggcagcatgtccccacttgaatctccgcaatatactagaaacattttctacaacatatccagggttacaatgctgcctaggtgttggagcagtccttggagtcactttcatcatttcccttgagggtttaccaaaaccttcaacagaagatattatcgtcctgtcatccgaagaatgcacactatagtcacaaccacccgacgcatacctggttgaatcagtatagggtctttgtggcatgattttcctctttccagagacattgttagagagtaaatcatgagcttcaaacgacttcccagcaacgtcatttgaagcttgcttagtacctggagagctgtttataggaactcggtcagcggacctaggatagactttagcaaggtgctctcttctgatgactttcacatttgaagactttacacctgaaataggccgagtaggatcaaccatacagcttttaggcaaaccaacaacttcagttccatctgataaagggatcttatagtttgctatatctgacaataaatttacatttccaataccagccttgaatatctgatcaccaataggtacccccacgtcttctttaataatagcagaagcatgatttacagaatctgctttccctggcaaagcaggagaggaaacatgttgcggaagaagcgatggccgggtgaaatgctcaaccgtctttgggaccaccagcggtttaccagcctctactggtaatatacttccagctagtccagctgctaaattagatgctcttttaccagtctgtacaacttcagtcctaatttgctggcgtttcgagacgccactttcatcctcagcacatgtacaagaatttccatcagcagcactcggtctcgatccactaagaaaaaatgatcttgctgagctagaaagattactaatgtgctttgcacgaatcatcgtctgcaagaaaacagaatcacacgcttagagaaaacacataaagataatatcaagaactaaaaaaaactgttccccaaaactatcttagtaacctataacactacctgaagcctctcaccagaattatgacaacggagccaccaaacgcagtaattaaggtttcaacacttggtcgtgtaaccaagccatgaattacaaagaaaaattacattttattagccatctagctctcttgtccacgaagttctacacaaagaattgagaaactttgtacattacttattcaaagtcaccccatatcttgtataattgtcagagtaaaacccatttaacagaataaaaattgggctttccagttttctctcagcttctccacaaagtatcatcctttcacacaccaataataccaaaatggctataacaagaatatacaacaatgtctattgtctaagctgaaatagaccatccccattctcgaaatgcattctaaccagttgctcaaaaaatatgtgcagtgaaattgagcctctgttagaatctctcttcacctctgattcacattcaaatcttaagaatattgaccaaattaaagtcaacaattagaacatacagtcaaacaaacattatgaatacgttcaatctcaaaattaactctcacaaaaactgataacagccgagttccaagctcgatatcaacgaaaagcagaataacagaagagaaaagaggagaaacccagaaatcaatgacatttattgctaagaaagaagcaaaatttcaatcggaaaagtaaagaacagaagcgagatcacaagactacgaagtcaccttaaaaacggtggtgtttgacttccttcgtctgcttcgttttccccagacaacagaaaaaagaaatcttcaggaggaaatgagaaagaaaaggagagacagaaggcgaaattgccttctccctctgtggccgtcaaatatggaagcttcaaagtttgttttgctctccaagcaaattgggtactactagctccaaaggtcacgacttttttttttttgcttttactctcttctttttttcttttcaataaatgttttcctttaacatacttaccttttttcaactatacccctaaatctttgtatttatgaaataacatcacccataaatgttttttccttttatgaattaggcaactctaaattgtatctgatcgattcgattacgataccttcataattttcagtatattctttaaatataatattagcagtgttttatattgaagaatttcagaatttcttatttaaatcgcttttcccggttaacaatgtggtgtcgaattactatttttaaagttagtgattgaatttgggaataaaaagaatatttggatttagctgtaaaaacctttttttgaacttttcgtcttttattactttgttccccttttgagcaaacgtttcggttctgtcctcctcaagtttctctgtactactttgaatatgactgttttgtgactttcatttcctttactattttagagtttagagagagattttgtgggtatgattcgatccgaactaaatttccgtggcctctttaatttagattttagaacggctccttttctttaagatagattttataaacttttaatccaaaagaaatataaaaaatctgaaaaaatctaaaaatgtgaaagcacaacaaagttttaaataatattttgaaaaagatacttttatgccattgtatttgtgcatttatgttctcctttgcaagtgtattctctttaagctaagaaaaatatattgggctttcctatcagttatcttatgagcccatttcaaactttgtttttcaagcccaaatagctgctgtataaaagacatttgctcgttatatgatcctagtagcttcgacaaactcatactacagcttaatctgaaaccccatagaatcttaaactaaccctaaagtattcactcccaaacctcatcatttactataagtgtgcaacatatggaaaacaaacttagtcagagacatactacaatcattgaaattaatgaatttcagattccaaaatgtaaataaaacggacctgtgtcacttgatccatgccaaatcacttgctgtcattttcttgttcttcataacactaaaagttagactgaaacatgactaatctagaaacttattgagtttccttattacttgaaaagttttaaaagagatatggatggtaaacaaaccatcccgccggtatatcactattcaaagcctaaggcatggatgatggattcattcatttcttttctttttttttgaatttaagattcattcatataaaaatattaattatcccataaagtatatatagttttaggctgtagataacagttttatgcaagaaaagtgatgggacttgaataaatcgaatagttggcatgacaacgccacatacacatgcaatctcaaacattctagttgagcccatcatttcatacacaatctcatgttttttccttcatcgacgaaagtccctttttccgaataataatttttcgtattgttagtttctttttaaatcctttttgccagctaaaaagttgcacaagataaaacatggtccatcatttcctctcttttttttttaggtgtgaaaatcaatctcatccatactaatctatttgtaattgatttatctttttttatggaattttatgtcttaataatttataacatattactatatgcataaacataacaaagttcgagtaaaatataaccaagttttaaaacttggggcttatatagctagttttctctaatgtattgatttacaaagactcgctttttttattttttgcatgactttcaacgtttcacactctttttgccaattgcactaattgttggttgaaagtataaccgggaaataaataaaagaccttcttttttacctactgatatcaatttgatgagtgacataaagtgataaaacaaaaatatttatattcatatgcacaaattttatcgtttagacgatgtacatgatgatcaaaaagagtttcggtttcgaacttccaattagttgttgataggatgtgaatgtaaacccgatttatagaaagcaaacgaataagatcacgacatggcgacacacttgtcaattagtttcgaatataaaaatgagaaatatatgagagaaaacaacaagacgatcgcatttgtttgcatttttgttgactttgatcaatggaatcttcatatattagttttgattactatttttttacacaaaacaaagtccgatagtaagctgactcctttacattgataaagtctacacctaataatatctcatatcttagatacaaatttgatagcttttgaaattatcttcaccaaatcttttggtagaaactttcaaatcacacataaactactagggtttttttttgttaagaaaatccaatgccagtttttatcttgaatttgacaacccaaagttatttattttcatacgaaaaattaatgaagacattttccactcgataaatctgtaaatatacatatgtatgtatattggtaagaaaccagtttttaaatattgtatttaagaaaccaaatagcaaaaaaaaaaattgtagattcaggtagtttaggtaatgctatagacatataatataagacaagaagacaataataattactgaattgaaaacaaaacaaaatattttggtgataccaaatcaaatgaaaccaacgtcacactttttgacaatgtcaccgtatccacttctacggtcaacaacttcatcaaactctccccttccacgtaagctacatctctacccttcattttaccacctatcaacagatctaaggctataatttttttaatagttattttaattacttactcttttagttacaacaccagagactaaaacttgttctgtaataataatacaattaattaactgttaatcactgaaaatattttacaattttttataaattataggttagaaaatggctcaaaattacagtttctatgtaattaatttgtttaagtatataggggagatagatcaagtcgctttaacttattttctttttgatataaataaaaaaaattataatcattttgatcaattttacgaaaaggtcgaaactttcttcagctgaacccgtgtttcctcttctctgcaactcaccggttcgccggaaaactctacgccgtcgccggattttgcaccaacgaaaacttctttaaactactttcttcattattcttctgctgagtttcaaaaactcagccatgggtaattgtatcgcctgcgtcaagtttgacccagacaactcaaaaccaaaccagaagaagaaacctccacggggacggcaacgaaacccatacgacgatcccgatggtttaagaactcacgcaccgttacgtgtgattcctatgagccatcaatctcagatcagcgacaagtacatcttaggacgagaactcggtcgcggcgaattcggaatcacgtatctttgtacagatagagagactcgtgaagctttagcttgcaaatcaatctccaagagaaagctccgaaccgccgtcgatgtggaagacgtccgtcgtgaagtcacgatcatgtcaactttaccggaacacccaaacgttgtgaaacttaaagcgacttatgaggataacgagaacgtgcatcttgtgatggagctttgtgaaggaggtgagctttttgatcggattgttgccagaggacattatacagagcgtgcggcggctaccgtcgcgagaacgatcgcggaggttgtgaggatgtgtcatgtcaatggtgttatgcatagagatttgaagcctgagaatttcttgtttgctaacaagaaggagaattctgcacttaaggctattgattttggtttatctgttctctttaaacctggtaatttccataaaaatggaatctttttgctaaatttagaatctttgatctccattttgctttcaggtcacattggttaagagttgacaattgtgttactttgaatctgcttatgaatttaacttaaaagagagattttgatgcattttgcaggagagaggtttacagagattgttggaagtccttattatatggctccagaagtgttgaagagaaattatggaccagaggttgatgtgtggagtgctggagttatcctctacatcttgctttgtggtgttcctccgttttgggcaggttaaagaaagatttgattcttgtttgaagttgtatatgctgattgagagtaactgagtgattcaaggttttgattgcagagactgaacaaggtgtggctcttgccatcttgaggggagttcttgattttaagagagatccttggtcgcagatatcagagagcgcaaagagccttgtgaagcagatgttggaacctgattcaactaagcgtttgactgctcagcaagttcttggtaataatgctgttcttgtgtcacttgtgaattttgatcttctttgctacttgtttcttgtgttggatttgagatggagaaaatggcatttaaagtgaaaacggtttctgtttccttctttgcagatcacccttggatacagaatgcaaagaaagctccaaatgttcctttaggggatattgttaggtcaaggttgaagcaattctccatgatgaatagattgaaaaagaaagctctgcgtgtaagtgttgcctctcatttttttcagatgagtttatacttttgtttggagctttgattggtttaacttacttgctcccttttgatgcttccaggttatcgccgaacacttgtctattcaagaagttgaagtgatcagaaacatgtttacgctgatggatgatgacaacgacggtaaaatatcatatctagaactcagagctggactccggaaagtcggttcacaactgggtgaaccagagatcaaattgttaatggaagtggtaaatgttttaccaaataccatttccttatgaggatttttcttgatcaaacgatgtttatcttctctggtacttacattcatgattttgatgcaggcggatgttaatggaaatggatgcttggactatggagagtttgtagcagtgataattcacttgcagaagatggagaatgatgagcatttcagacaagcttttatgttctttgacaaagatggaagtggatacatcgaatcagaagaactacgtgaagctttaaccgacgagttaggtgaaccagacaacagtgttataatcgatataatgcgtgaagtcgacactgacaaggtttttctaaagctctatacatcagctcctttctcgctataaagactcttcctatagaaagtttattaaatacttaagaggagtcataatgtttgattttgcaggacggaaaaataaactatgatgagtttgtggtgatgatgaaagctggaactgattggagaaaggcatcaagacaatactcaagagagaggtttaaaagcttaagcttaaacttgatgaaagacgggtcaatgcatctacacgacgcactcactggacaatctattgcagtttgatctttacacttgtttatcaccaaaacagaagcaatctgatggctgcttttcttacacgttcatgaagggtttttttctgggcttttttcagatgtgattttggcttacttcactttgtttctagagattcttttttttggttttggggaagttggaaatttgtaatttgtgggcgtagttaggcttttcactggagaatgaatgaatgtgtatgtaatatttgtttaattattataaagcttctttctatcactcagcttatgtcttggactaaccataaacaactgaaccatacagctataaatcagcaactgacaaaaatcaattggacaagacatgggtttatgttcggtttacagagaaagaatcagtcagcttcttgaagtccatccaaaacaacagaaccaaccaacaaaacaacccctgtaagcgcaagagcaccggccaaaaccgcctgagcaaccactagagtagttgagtcatccgggatcaacaccacggctacaatagcagccgtgagagctggtaatgcagccgaggctaagaccgcaggcgatgttccagctaagttctcaaggagactgagaagaccaaggtcctctgctttggagaagactttaagcttctcaagagatgacaatgtgagtcccaacccctctgcttttgacagcaggccagatttctcaacgttgctcaacacttttcgcttctccagcttcttgaaaacatcaacgtttatttgctcactcccttcgaaaaacaatccagctccgtaccattgtttcttccacttggcatcatatttgttcaccttttgttacccgattcagtgatcacaattacacaaattaaaaagtatatataaaactctgcaacaatactatatacagagacttcaatgtctttgttccattactaaaatgtactgcttattcatgtttctaaagattatcttgagaatcaaaaaagatttatactttatgaagtgattgatgaaagtgcaaaagatctcagaacttaaacaaaggagatgattaagagagttagttacctttttctggggagccatagctacgacggagaaagttgctggtgattttccggtggagaaagaccggcgaaagcgggggagaatgggattggagagaaattgtgtctgcagctgagccgccggagacgatattggagcgccgacgacagccattgaagaaaaatcgaagcgaagcgatgaaaatgatttctttagagattctttcgtgtcttgtttcgccgttggcacactatctgaaactctgatagacagagaaactgccacgtcagatgatgtctttgtgatttcaaccaatcattttcgttagcgctttatctccggtttttcacttagaatttatataatcagacaatgtttacatgtaatagtttaggcgtaaacaaaataagttaaatgaggaattagtaaatcattttagattacagagaaaactacagagataccaaaagcaaatctgtggtcaaaaaactttactgacaagttttgcttcctttttcacctctcaaatctgaaatctctctcgtttccttcaaaatattacaggtctcaaagctcatgccatctgattatagtttccgacagaatctgaataataaaatgaagaatcataataatatgataaaattcttaacccataatgaatctttttattctatttcctcctcagcccaagaaactgttggatactcaaaaacacctaacatttactatcttgacatctttctctccttagatgagtcgatcggacaagcttggcaaccgccggaaaaaattgagactagccgtaggcattgtgtctcggaacatcggatgccgaagataataaaaccctagagccaccgccaccattttcgcaggaactgcatacagaactattgtgattaccaaacagattgctatgaacagctttgtcgctctcggatctctccagctaaccaacgcttgaatccgttctccttgcgctgcaaaatctcctagaatggtctgaaccctcactgctaagatccttaatcggtcgtacctagctcggattacttctggtcgccttgagcttggtatggtgtcgaattcttcatctagctcatcaggatcgacggtttcagcttgtgataagcggatatccataccagccggtatcttgggtctaaaccggtagtaccaaactccgatcatcaccacgtacaagaatgcagtcgggactaccaaatcagggtaccaaacaagaaccagatatagaatatggactagcaccgtcgtcactggattcctccaccgcctgatattatccaaccacttagctaaacccactgcccaagctaaaacaccaacaattctgtaccaattcgctttgcttttcctcatgctccatgcatgcgaatctgcatctaacatatatcgaactacctctggtcccaatggtggttctgctcgagccagccaagctgctaccattttcgtggcggcccctcttaatgcatcttgttgtgctacacctagaggccttatgtagtgcatccgaggcagaagcggctgtccataagctgcacaaacatcaggcagcagagacgggcatgcaaaccggactgccacttcaatttcacccatttttttcataccgctaggtaacaaaaccaacagaggatatgaattggtgtacactttgttgctctctaacgtcgacacccggatccgtatcttcccaatccgtgtgtcaggtctatcatcggaggcgtcagagaacatcctccaattgtcgaagactccaacagttagcacggtgcaaggatcataaacctgccacgtatactgctcgtgccacctcgggtcaaaactgtctgttatggttcgagtcctgacccatttcttcccgtacttagcaacacaataagcatcagtggaacctttccctccgtttttcgccttcatcggcaacaacccacgagctccaagaatccccaactcaagtattccaatcggcggtttccatagctgcttagccgtcggacggaaatcgctgcatacatgcgccgcctcttcaagcacatgatacccaccttcgagacaaagtctaaggctaatccttccacaataaggtccaccaccaccaccacctccaggtcctcctcctccacctccacctccaccttctccttccagagtgtgccatttcgacggcacaaaacgctcatcaattcgctgctcgatggagctcactgggatcatggcatgtcctagaagtgttgcttctttagtcgtccggtcttccaccatcagaaccaagcaatcttccaacggctctccagcaacaaagatcatatcctcatgccaatgaaacgaaccactgtggttattcattgagcctcttcttgtacgcgccgactgaaaccctaattgagctttcacacgaatctcaggcgcagtcaacggcgggagattaggagctatgtgtaaatcctgtgcctcaagaaccgtcactctcaagtaccaaagtttcggcgattgatacaccttagaacgcgtgtgagctacatgcggagcatcagagctccaagcctccggaaatgcctcatctacctgagtaccaatccaaacagagagctgaatgtcaccggaaattctcccagagttctgatccgcgccggagccttcgagccgataccactgaggagcaagcggactatccggcgggtcacgaaccggaacctcagagagatcaaaacaaactcctccgagaaaactctccgacgaagcatcccaagcagagatctcaagagtcgcaccagttacagcggaatcagaccggttatgaccaagagcaaaaacctgattccactccggtgaatcaaccgattcgccgggccggttaacggccggtttagacctgacgaaatggttcgacgtccgtaccttaacatacgcgctctcgttaggtggtaagccacgcgccttcacaatccgaacgaagagatactgcattggctcaacaagattgtaaggatgatgagtcttcttctccatcgtcgtctctcctcctccagttttgctattgataaccctaggtgaataatctccattcggtggtctcttcgtaaccctaattctatctccgccgggaggtcttcctacttgcatcttcctcacttccggtggataataatgtacttccccagccgatggaggtggcggcggagacggtggccgttgaggatggttatcatttcggtgaggatggttatcatttggaccttgcattacatgctgcggtggtgattcttcaacaataaccaccggaggttgctgatgtgtctctgtatagcgctgactctgagccgattcgaaaaccctaccttcttcaaccacaactacattaggtttctccggtggtatattcatcatctgctgcggcggaggatgaaattgttgctggtgttgttgttcatcggcttcttgttgcggcggatgaaattgttgctgttgctgttgttgttgctgtcctccacctccacccgccgtgtcttcgtcggcggcttcgtcgtaatagtagattttgagtccaatctcgccgcgaatccagctgaacacactcttcttctccaaagggaaatacacaagaccttcttcacctcttcgcgagaactggcttccatagatcttaaccctaccgagaaaatgattcttccggccacctccgttaccaaatcttttatcgttataaacctcgatatcgagctcgtcgtaatccatgtttttgggatcggagacggcgaaatcaagcatctcgttccaaatagggtttaggtcacggaacttagtggaggttcgtttcttctgagcatcgaaatcgacaacgacgtaagcgctagagcttccttgaccatctttagggagaatattacgagcttcaacaacttcgacaacgagcttacgctggatcctcgacggcggaggatccgagtgaaacggcgtcgtgttcatcgtagtggtagtcttctcatttctcgagaatgtcttcttctctcattaagatagtgagagagagaaggttttgttgtttgtgacagagattacggtaatcgcggaagagagataatagaaagtttttttttcgaggtcttgctttttttatttgaatatattcctctttaaagctttattttatttacatgtttttagtactaatgaaatcttaatttccattaataaactaaaaacaaatcctatgtactatacactatttattcatttcattagttttaattaaaacttactaaatattagctaaaactgtttctgacacgagtgtagataattaggttcatatttgtgtagtttgtgacaaagtaaatctaggtaaaacgtaatgaggccaaagcattgtgattagtaaaataaaagagatgaaatgggttggttaattagagtgttaaatatgattaataaacctaattgaggtggagggtaaaaagggaaaggaatatatggtgttagagtggggataatgggaaatctgattccattctctatcgccaagccttcgtttgattcttcactttttacatgcgctccatttttttaattgtactatctcattttatttgtgtttttgttgacgtgttgattcttcattttataatatggtacttttcaatgttcctataaaccaccacacatgaaaagatatggcgagtaaggttgttggatggtatttatagttatataataacaaagtagtttcttaatctaacgaaagaagatgatctgaaacgctaacttataaaggaatattaatatttaccatttgcataaaagcagattccgtaaacctgtcctacacggctacatcatcgttgaaaggcccaagcattctacggatttttgcttaatcgagataataagcatagattacttcactctgaagatgggtcacttcttgctaaatgaaaattgaaaaaataaattcaatttgattcgattgtcatgtcagttaaattcagttcagttttagatccatattgaatatatctgtctttgaagaaaaacactatagaagctcattaacaatcataacagctaggcctatgaacattcatgataggcctgccctagttacaacccgaaaaggctcggcccattaacaaattaaagcatttcttttttaatttacaagagagacaacattgctttcttattgtgagaaccccttatcccccatacaaacaaaacaatcaaatacaaatgttactctttcttcaattaatcgcctgtagagatgttgttgcttcatattcaattgacttggtgaactgcaaaaacaacaacaaaagagagaataaaaattaggattttggtaacagagaaccatgatgtcactaaacattttctggacaaaagctcgtacctgagatatcttaagatcaagctcattccactctgaagatgggtcacttccagctactatccctgtccccgcatagatcaatgccccaagaccctgtaaatcaaaatacagttcagcatttttttacaagttgtagcaaaaaccgtaatgatcgattttgctataacaattagtgttaaagtgtgttttttaaagggagaaagagatcaaataagctcaccttttcgactagagctgatctgatcccgactgcaaattcactctcctcgccaccaaaaaatccaataggtcccgcatacattcctctatcgaatgattctagaagaagcaaaatgtttgagtcagcataattcttaatctctacatctatagttactagaagatagttgaaccaaggtagatattttacctatctccttaatcaaaagccttgcttcttctgctggaagcccacaaacagctggagttggatgcagagcagccaatattttatactatagacagatagaaagaaaaagggttaaagctaattcgaagaaatgaagagcttggaaatgtaaaaactattccaatactattatctcacctcatcatcttccttcgtaagtctccctgccaattgagaatatagatgttgcactcttgcaagcttcctcacagttttttgaggcttgacaacaactctgtcacatataccctgcaaagcagaagaaagcataataagaaaaaatataccaaactattatccaagaaatgaagcattgaagctgcagagcatcaagattgaacttacgtttaacttttctcttatattctctcgtacgatagagaactcgaggtcgtctttcggactgcaacagtttagcaaaaattcagtaaaatgataatggagaactggattctgtaattgttcaaagcacttgaagtaaaaattgacctggttagtaagtcacgctctatctccatatcacgagcactagaagcagctctaggcctagttgcagccaaagcttcactgcagacacctaattgagtcctttggaatagtctctcaggctgtttcacaaagatgtatgtcacaaacatatttcttagaaataaataacaaatgtgcacatatctttatcaacagaacttattatcacagactacatataaaaagacctaccgtgtttccgataaaagctggtgcaccaggtggttgaagacagaactgatatgcatcatgcccttcacgctgtcacacaaaaaaattagtgagatataaatctaaacattgaaaactgactactatataatatccagagataaaaacacacctgtaactgtgctagccaagcaatgggatcaatgtcggtatccgtaattatcctgctgttacgagcaagaacaacctaattccacgagccaaaaacatcagttaaaacgaaacctataaacttgttttaagaatagatacgaacacaatctctaaagtctaaactaccttgttaaggggtgaacttttctggttaatcatctctaaagccttctctacagcagggaaataagctcctttggtaggaacatgattcttgcttaaaacagatactcctaaagatctgtttctcaacttcattacaacagaagaaacttgaagcatagtctcctggagtgcttcaatagcattttccagagtccaagagagttcatcatcccaagcaatagttgcagccaacattgaacttccaccaaactcattaaactcaacctgcacatgtatcagccagttaaacaacaacacaaactcaaaaaatctcttataaagaatcaatctttaaaggtacctgagggactgaaaagtaaaatgcaccaaaaggttcccattcaacagcgatcttgccattaggatcaaaacgcataccaccataggcacgaatcagaggtgacgttgaagacaaaaaccttctgatggatctccaatcgtcatgagagaaaggatcaaggtcacggaagaaaactgcagagccgataccagcaacgctaaccagattacgatcagatgacactgttccgtttccgtttccgtttccgttctcgttagctagatcgagaagaagatcgggacgaccaacgtcactgcgacgagagaagaaacagcgaggctgaatctcattctgggcttgaagccaatcaattgctccgatttgctggtcaattggaacctgcaccaaatccaaattagggtttattgcgcgggaaaattcgactgtgatttgggttttttaaaaaactctgcgttttaatgagagtgactgtatttgatcgccgccttgcctttacaacaaattggattctaatcattattttacttattttctggcccacaaaacacaaaattattacttttctagctaaattatcttagcatggccacactaactaaaagttaacagtgttaaattagatttcgaggactaaaaaaacatgattattctttctaaaatgtatttgatttagtctacgtaaaattgactaaaagaaaatattcattataatttacatgtaaaggtcccaaaagtcccaattaaatagttcgatggactcacggaatcttgtacgaccgagttcgagtgtgtgttttattcataaactaataagaaatataataaccatatctttttgataattattagtcatcttctaatagtttatgattaactgttagatttggatatatttatcgttgttgtgagctctgctttatagtatgattttaataatcataacgattaggatcttaaatgattaggcataaacgatgcagcaagacagcaagctagagaacgaaatcaccacagaccaatgtaaaaacaccacgtggcgtgatctcattctttcacatacagcagcaaatcggattgtgtcttagaagaaaaaaacagaggatgatgatgatgatgatgatgtagtgatgtacctgtaaccgaacgacgccggaggaaaacgacggaggttgagatttgagttcagagacggcggagattagcctttcagtggcggctgccggagataaaacagcagtcatagtccttgtctccactgtaccaagtggcgtcttgaaatctccatcacaaccattcatagacatcgaacatgactcatacttctgaaaattatccaataaaattaagttaatcattatgaattcctccaaaaaaaagaacagaattgaaaaaaacaaaacaaaacagaaaaaagaccttgcgggagaatctagtgaatggagttggagagtaactacgagagatggaaatgatagagctgtgtgttttagtgtttgagcccagaaactgagaagaaaattgaagtgaagccattgcagaaattcgtaaagtgtttcttgaagattttgtttaattttaaactttggtgtttgtagtatagagagattgctctttctgtttttttttggtttgggtttagagttgagaagagatataaataggggactgatgtagcaggggcccactaaaattgaagattttcatttcattttcacacaaaatttctcagaatttctttagtaaactactctgaaattttcgtttttttcttctaatcctacttttcttctattctatctttatgtatacaaagaaacatttttctaaagttagtcgtgcatttaatatttcatgaatcatttacttggtctaagaattaaattaataaattatatcagttaattgtttgatctattattattagtttcacaaaagtaaaaagtagaaaccaaattaaatagactaaaaaacagataatcgttttgtatgaatgcatgttatcaaacatacagaccggattcgtttggttgatttatcgtcgacaaaaaagttataaatgcatgttataatatcttgacaaattgaaatagtcagaaatgaggtagtgtaaaattgcatagaccaagtatcaatgaatttgagcaatgcatggacagcaatttcaagtggattctctttctaagcggttcctctcgtgtgggtgttgtatgctagacgactcttctcgtttgatacggaagcggtttgcactttaaactatcgtaaaaaacattacatgtcactacaaattgcaaacgcattacaagttctcgtacataaggcatatggcattacacgcatgctcctttaaattttgacacatttctaaaattatagtaataacaaatatcaagtgaatttaagtactttacatgtaaaacaaagcatagaataacaagaacagattttaaaactctttgagtataattaaatttggaaaatcaatactatttgaacagatcttcattagatcattgcattattttgaggagtaaattactttgagtatctttttttgctaggaaacccacttaggctctttgagaccagtttttatcatttaaaaaatattgttaaaaatcttaaaggaacataattcaaataggaatatttgctttaatttcatgtttttttttctttcattttgagtcaattaagatcacacgagactggcaaagagtggagaggtgcaacaatttccccaaaatttctatgaaataaccaccaaattacacatttattctcatgtacatatggtgattaagacggctcaccaagtacatatttgaggaaacgattattctttgtctttagatttttgtctgatttactcaacctggtcaaaatgaatattgttaagactataaaggactagactttagaagtcaaattgttattttatcatcacgagctatatattaaaattaagaagtcttgcagataatccaatagaatgaaaccataattcaacaagcatcattgctgttgtaaaaccgaataaactgaaactagacacggtcctcagatattatagtatgacttttaaaagtgttttaaaatgttggacgcggtctcagactctcagctgaacataattttattgttattcaagactttgaatatgtgtgttgtggatgctacgaatttcttaatttcgtagaaacgttttagcttattctcatttccgtcatccttctagacttaagtctagtgtcgtatgctttagttcgaaatcttgaattctatatgtaagaatatgactatatgagtgtactaaacactttttttttccttcacgaaaaaatcgatttggttagtcaaataactagaaataggacgttagttgaatttagataacctaatgtattttgctcactatagaaaagttaacctacagtataatttgctttcacactgacgctaacaattttcttctagtattttaccattcaagttcttaattacgatttttaaaaaaaaataaaaaagttcttaattacgtaagattaataattttatttaaattcctgcatgtatatatctatatatctatataatttttatttttttttgtgtgacaaagcgtggataatttattcctttgagtataaaacaatttgggaaaaataaagtcgtcttctggagtctgagttcctaagaaagaaaatcctacttgcaaaaattatttgcatgcatgttttaatctttagttgggacttggaagtccaactttgatttttttttaaaaacaaaaatggttattcagctactactatttgtagataaacagagcataatggaaaacacataacttaaaaaaatgataaacacataaatcaagagttaacagaaagtacacacaagttagaaaatgaggttaaaatataattactctacgactaaacctataattcaaatgttcacactccatatttatttgacaacttaagacataagaccaataaacttctatcacaaggaggatcgactacaagggttgaactcgagacattgtttgacaacttgcgaaataagtccaattaaactactatacaagttgcccaaatcccatacttttgatcgctggtcactggtcagaataaaaaatacaacaaataggcaatgctagattgattatcttaccttacgcggcagaagctgcaattcagacaaaaataatttggagtggcgatcaatcatatatcatatgcgacaaaaagtaatacgtatgagtttacaaagcaaatttgcttctttttttttaataacttctggttgcaaggtgatatgaaaaccccaagtccgttctggctaaatctaattattaaaatatgattttgtttgtaaaactataacgaatatcattcttctgcagaaatcaattttctttatttttctaacaatataatatcctgtattcatgattaatttcttttaataaaataaaagaaaattgatctctgcagtcaataatttacatagcaatcttgggagatggtcttgttacacagaaaattgattttcaaaaccaatgatttacataacaatcttgttgcagggaaataataagatttgggatcccatgagatttcctctgaatttatctgatattggtgtgctcgtctgtattctctacttccacacttcattctttatcgagatagaagaaatcttaaaattaacaacagaatacaatgtttacatgtggaatacaaaaacaaaagtatgtaaaacctataagagtgttataatgtttagaatccttgtgttagtgcaaacacacgtccctctaaaggtggaggcaatgcagaaaccgcatcttcgatttcctgtgaaaactcgcaaagattaattaccactacaaggtaagagagtaactgatttcctactgcttcataaccaggttggataaagaagacacaccttcactgtataccgagccgaaaagtggattagcaggattgctttgttttcaaacttttcagcatgatttactatctgcagtttaaggatatatgaaatcttctatgaccatcaagagacagaaagtaacaagaggtgtcaaagaaaggaggatcctgacctcagatatatggatatgtccataatctctcgcatgctctaccgataccgaatcatcaagaaatgtgctctgcacaagaggaaatagagacagcttcccttttaatacaaagccatgaaacttggaccgggaagaactatatcattataaatcacgcacattgtccaaattcatatcagtagcagatattcacctccatgacgagaacctttgccttgagagcatcagcattagtttcatcaactacaaaatccgacgttgtatctcccgtaaaagcaacttcaggagttattatgctgtctgtaatctacaatccacaatccaaacttattaaacaggcttatatactttggaaagaccattgcaaaactattgactttgtgatagacaaacataagaaaaaattgacaagcaatattaagcaaatcaaagacaaacctcaacacctgaaaccttcaagttcttaatttcatttccagataggccaatatattccttcttgagtttatatttagttgaatacactacataaccctgcaaaatatcaaacgaaagcatgaattcaacgaagacacataacgctaagatatcgaaaatctcatgcgagtttactaaaataaacctggctttggatgacatggaatgtcttaaaggctttgactttgagatctttccttataataaactcctcccctgcatgaagaagtgtccaaggtttaacaaaaaagccaaatcttggctgcaatgaatgctagaggttgagttaccacctatgtccaagccaacaagattgtgctttagctctgaagaatctaactttctgtgaacttcgaataaactctcaacagtttctttaatggatgcgggtactataatcgttggaggcttcattttgtacaagcctctagtagcaacatacattggtaatccaccctaacataacaatacgaatagtttagctcacaatttgagaatgtaacacccaaacagtaacagagcaataggctaatataacataacaatttagctgacaattagagaatgtaacaccaacacagcaacagagcaatatgctaatgataataaacacatggtggctctcaacaagggtttatcaaaacagtaacagagcaataagctaatgataataaacacatggtggcagtctcaacaaaggcttatcaaaattgttcttaaaacaaaaagtcaaaagaaggatctttgcaaaatataatccgaaatttcaagtctttttatagaagattcaagatacttacgatatgatccatgtgagagtgagagatgaagaggaagtcttgagaaattgcgcgatgtgggcaacgaccaatgtcgaaagctatccgaagagatggaaatatgatgcacgtctcgtgcccaccaatcgacaatccctcgatcgggtaaccttcaatttgcattgctttcttcttctccatctcactgttccttagggtttatcgaattttggctgtgctcttcgttttcaaatattgatcaccaagtgttcgatgaaatgtctcacaatcacaagcttttttcttccatgatcattttttttttttttaataattttatggattgggcttaggcccataacggttaacgagactacttcactggagcgggaaccactaggcactggttaataaatttcccacgtgcctctggtgcaaaagttggtctttcgtattcaacgacagtgcaagggtatgattgtaaatttacttcgaatgcttcattagaacgtcgcggtattcttacacttgttttcgaagtaatctcgacgactataacaaaatctgagcaatttcaattaaatatctgttactgttgtattttaaaatctagactactgatgacataaccaaatttttagactaaattaccctttttcttctattttaattatcgcatttaatgattttcagctttttttctttatagattgctctcttaactcttctttaattttccctctttcgagttctgaatttttctgtaaaaattaattttagttaaactaaaaatgtttgacaaaaatactaaatttcagagaagatccaacggctagaaatcaactgcgtaagattggagttatggagatgctcgcttactttttggttaaaattagaaatattattttgcgcaaaatatttattttctctttccgtctggtcactgaaagtctctgaaaccaccaccaaagagaaaaacagttctttagagagcatcaaagctccgaggaagagagagagagacgctatggaagcattgaactaacacaactctaaatttctaatttacggtatattatctccttctttgttattgtttttgtttggtctgaatcggacttggatttagaacggagatccgacggttactccaactttaaaccgactttattttaagacattgttcgagtagtgttgggttttagaaggatctctctgtttgggatttgttgtttgactctgtcggtgttttttgtttgtttgttgttgtttttcattttggaaagtggattttgagtcatttagggttcttctttttcagtctgagttccagatctggtaatttcacttcataaatttatatggtaatcattgttttttttttttgttctttcttgattcttacatttagttatcattaggtttatctttataagcttattattagagttgattagaacaagataatgtgttactctccttttttgccataactaattaatgaattaaaagacttcttcattttgactattgtggtagactagtagttgccatattcacatactaatattggcttgtgttgtttcttgggcaatgcaggtttgttttagttctatacattatggggaagtctacaaaatggttgaagaatgtattgcttgggaaaaaaacttctaaatctagtggttccaaagacaaagaggtaacgcttttgtaagagaattctatattatgtatgtgatgattaaatactgtatgtggagaatttggatcataattgagaaaacagtgatggttttaggctaccaatttgcttatgattgtctttttttttttttttttttgttctaattatagttataataatgcgcagagagttgtgagtggaaaagaggtactggttacttcaaaggtggaagaatcagatgtggtatcagatcttccatcttttgaagttgcagagaccaataccgttgatagaagtggtggtatgttagagactcaaaatgtaggacctgaagagatctcagatgatgaaattgagcttcctgaaggaaaatcaacagattctcagaatgttgcacctgttcaagatcattcattatctgatgcagagagaatccaacgagagattgcagcaacgtctgtgcaggctgcgtttagaggttacttggtaataattccagctgtttcgattttattaggcttgtctctctctctctcttgattgctgcttctggtgtgttgtctttttgtatatcctaacatgagctctttgtgtgaaggctcggcgtgctttttgggcactcaaaggcataataaggctacaagcgcttatccgtggtcaccttgttaggagacaagctgttgcaactcttttctctgtcatgggaattgtcaggttgcaagcatttgctcgaggaagagagatcaggaagtccgacattggagttcaagtttataggaaatgcagattgcagctacttcaggtaatgatactttcatttctttgtaagttcaaacttacacttaaatacaaacttagtcgaggaagatattctagtttgggttggtggggaaataattgttagaactggctttttttatcaggggaacaagcttgcaaatcctacagatgcttaccttggaatcaagaaactaacagccaatgcttttgctcagaaggtacgcttgttggtagagttatttattataatgatgttcactgtatccaatatctcttttatactatggagtctctaattttatttaaagatcttgatggataattttgtttacagcttctcgcttcatcaccaaaagtgctacctgtacacgcatatgatacatccaatccaaactcaaacttgatctggttagagaactggtcagcctcatgcttctggaaaccagttcctcaaccgaagaaaacgataagcagaaaacctcagaacaggcttttagtcgaggctgagtctgctaaacccaagaagagtgtccgtaaagttcctgcttcaaactttgaaagttcctcagtacagacatcttttgagtttgagaaacccaaacgcagtttccggaaagtttcaagccagtcgatagagccacccgctgtcgaagatcctcagattgaacttgaaaaggttaaacgtagcttgaggaaggtacataatcctgtagttgagagctctatccaacctcaacgatcccctcgtaaggaagtcgagaagccaaagcttggcgttgagaagacaagggaatcatcatatccgctggttcatgaaactgcagaagaacctgtgaatgtttgtgatgaaaagaaaaagcaagaaatttccgaacagcctgaggaggaggtacatgctcttgagatggaagtacatactcctggaccattagaaactaatgaagcacttgattcctcactggtcaaccaaattgacagcaatgaaaaagccatggttgaggaaaaaccctcaatggaaaaggataccaaagaagaaaagactcccaaaccaaacaataaagagaattccgctgggaaggagaaccagaaatccaggaaaaagggttcagctactagcaagactgagcgtgaagagagtaatgggcatcacgagactagcccatcaatcccaagctatatgcaagcaactaaatcggcgaaagcaaagctaaggcttcaaggctcaccaaagtctgcggagcaagatggaactgagaaagccactgttcccagacgtcactctctaccatctccaggtaatggtaggatcacttctcactctccaagaacaacgagactcgcaaactcaggtgacaaaaccgggaataagaaggagaaacctcttctgtcgtcccgagaaggaaacggttagtgccaaaagctaatacatgcaaactacattctccaaatctctcagagtgctttctttgataatcttactgaaaatcactagagaacttacacattctcttgcatctaactgctctcaactgtgttgttggctttgcagccaagacaactccagcagagcggaagaggtgattggttccagcggaaagtgaagcctttatcgttcttgattctatagcagcgacaataccaaacatgaagaatgcaaccatcttatctatttaaaagctagagattatgagtctgtgattgtgttttgtgtgtttatgttggccaagtgttatgttggcggctaagtttctacaattgtgagtgtgtcccgagccgataaagttacatcacaaggctttttggatcatcttcttcttctggtttttcgttacattactttgattacttttgaagatctaaactttttatgtttatatgaatctgtgattattttctccatcatttatatgtttgttcttcttaagccttctaagattaagcttactgacaaaactataaagtgaaaacttgacttgtactgtcaaattaacttagaccttgagttgaaggatttgactgttatctttttcaactcaagaaaagaaaacagacatgaagcataaagagaatgtagtatatttcacatacatgatcttaactcgaaccgtttctatcaaacatttcagatctacggtagcgattctttctatgaacatcaaactgaagtgaagaaagcttatgcgaaaccgctgaccaaatcatattcacagaatctccaacttgcgaaggaaagcgatactcaaaacacccagcaacctctttcaatctcccccacttcttcttccactgatcctctgttatccctctgagaatattcaccaagaactctttctttacagcttcagaagcatgcacaaacacggagaaacccgaataatcaagagtatcttcaaatggaagctcaatctgatcactgattataaccggaacacaatggctcacaatggcatcgaaaagacggttagaggaaggagtgtcacccgcgatattgagacaaaacttcgaggaagccattcctttaccagtttgtttagtcccatttcctctaacagttccaaatgcaaagtgaacatctttctcatctttcagaaggttatacagttcttgacgaatagttccaccctacgatgtttaagattagaatcagtaacaggattgatatcgattagagaggaaaactcaaagtcacttacatcttttctatagatagctccttggaaatatgccaatacaggacgcttctcaaacgaagctgactcgttgttagagatagtcttaacgacgtgcacgtaaggcgcaatgatatctttctcaagattggcgatagcagacgaataccttccgaaatccgaaagaacaaacattgctgatccaagaaagtttcttgcatagagcaaactgtttggatggtgagctactatcaaatgatctttcccatcaaatcttttccactcatcttgacttttcaagaactcaactaatctttcttgcaacaatctatcatcactgcttgtttcgtttccacggagcttcgatttccgattgtaactcaacgaagcaaagaaaggcacgaaaactatatcagcttcattagagttcttcactctaatagctgcactactacaaggtctcttgatttcaggtgtctctgaagctaataaatcaagtgttagccaatactctacactgtgttgacgatttaacccaccaggataagatgggattgtactaatgttgttgacatttggccaaatctcagatccttttttgtgccaattcaatatcccaaagtgaaactcagagggtagatcgtacataaacaccttcaacacatctctgtctcgatcgcatttcgtatcgattagtccgaattcttcgttcttgatgtctgttcttggaagaatcagcttgcgaactaaacttgaagtgaaagaagaatcgtggcgttgaaggaagacgagagaagagacaatgaagagtagcgttgaaacagttatcgtgtaaaagaggaattttgaagaaagcaaactcttttccgacatttttatcatccaaacaaaacaaagtgggtgggttgggttggattttcttgtcggttaatcgatttgcagaaaaaggtttcagctttcgaccatcatcgattggggaagaatagttaagtacctgaggaaatagggtttccggaggtttgacgccatggcaggagaagagagagtttgatgcatgtctcactcttcttgacagccactttttaggaaccagaagaattc

SEQ ID NO: 135 - DNA, 129547 bp, Arabidopsis thaliana
gaattccgctagtgttgctggtggtgttgctccggatccggagcattcgagggtaccagatccgcaatctccggtgagacaagtgaattttccgtcggtgtcggtggaacattgagttctcccccagaatcttcctccccatgaagttggagcgctgattgttcgttcttcgcctttttggagaacgaatccggtcgtcggaagtggtggaactccggcgtttgataaaagtccaggccagactgtgtattcgcatttgttcaccataatgaagctcgttgatctaactcctgtttataaaaccataaaatcatcagaatcacagtattattaatcataactaaagttgatctataggagaagattcgtaccagaaacgaacaaatgagagaagataaggaagatcaatggcaacggaagagccattgaattggagaagaagaagatttaaggactttaattgctctgttttcttcttcttctttattagttttatttatgaaacagagacttaaaagaggattctgagagcgaaagagagatgaagaagaagatgtgtgctttatagtagaagcttttttcctctgttggtgagaatctggtgtatgtgttggttggtagcttatggtacgcctgcttacgtggacacatctaattggttattttttttaaccgttgagattaagaaaagcacctgatgattttatatagtaaattttgttgtttaatcggttcatagttcataattagcactatacgataatgggttagtctggtttttaaatagttaaattaccactaattgttgtccgagtttgattgataacattttaacgaaaatatccaattaccttttgacgttcacttttaattaaaaatatctacaaaacgtaaagtagatctttatttttcaagattctttaactttactgtttagttacgtgattaggatttgtaaccacgtagacgtgtaaaacaaaattacttttttatctgtgatttataggaatttgagatttgaatgcaacgttgttgtttcatctaacaataagtgatgaagaacttcaaaagtctaaaaccatatcatttataaaatcatcatttcattttcagaacaactaggtacgattagtggacgtttcaacgtctttcatgataatcgcgggccatgtaaattattatatttgaggaatgaggatccatataatatcttggctatataaaaattatttatttgttcaatataatatctttgcgttttattgatcaattgcaagtttgcaacgatatacaccaggaaaaaaaaggagaaacaaaattcattttgcttatacgtatgtactatgtacatttctgtatactcaaagttgttagatattttgttgtggaaagtgataatgttgttactttttactgttttttaggtggtgtgaactgtgaaagtttgaaagatacaaaagtgatgaataatttttcaataattgttttgcgttgtattattttttgtaggagtaatagcgaccatctttgtaatattgtgtagacagacaggtcacatccactttacaatatatcgtaagcaattgccatcgtcctccctcacgttttttttttcgtccgtcacattacaataagatatttaatgggcctttatgcatggtttagtataatgaataagcccagcaaattttaacaaaagcacaaatgtgctgcccataaattaggttggaaatgcagattgcatgaacttttcgatcatattcaaaaaacatagcacaaaacaaacgttaactccaaacagagtaacaatagttgtcgtctaattaatatattgttccaaagaaaaatatgtagctacgtcttgcctctaacacctctttttcacatcacaagcatcttaaaatttcttaaatcactcttttcgcgatgagacatgtctttgtcgaggtgttggttctgatctctttggtcatcttggagttgagctatgcgtttgcaccaatctcatcgtatcaatgggtcgtctcgtattctcaacgtttcattcttggaggcaacaagcaggtaaccattttcatttgaatatgtttttatttgttacaataatatggttttagctatcttatatgaaatttcagatgcatgatcaatctataggttatagtattcaccaaaaaaaaaatctataggttatagtgatcaacgacatgttccctggaccgatccttaatgcaacagcaaacgatatcattgtcgttaacattttcaacaatttgcccgaacccttcctcatgacttggtatatattttcaactttttgttttgggttaattttaggaataattgttattaaacctctatgtaaattaaaggaatggattgcaattgcggaagaactcgtggcaagatggagttcgagggacaaactgtcccatactaccggggacaaattggacgtaccgttttcaggtgaaggatcaaattggaagttacttttattttccgacccttctacttcagaaagctgccggaggatacggtgctattagaatctatcccccagaacttgtcccagtcccattccctaagcccgacgaagaatacgacatcttgattggagattggttttatctcgaccatacagtatgtttctttgataaattaccgtattatcatcaaacctacattccaatactatcctttttatatataaaaaaactaattttgtagatcataatcattttggttattgagttttatcttgcccatttattgaatgtgttattagtttcattgtaaaagatgttttgcttgatttgcataattaacacttggtttccaaattttggtgtaaggttatgagagcttcacttgacgctggtcacagtttgccaaatcctgatggtattctttttaacgggcgtggccctgaagagaccttctttgcatttgaaccaggtgagtttttttcttcttttaaaaatattacattatatctttaataatgtagtttacacacaaatgttctttttatgttgtctatatataatcacaggcaaaacatataggctaagaatatcaaacgtgggtctcaaaacatgcttaaacttcagaatccaagaccacgatatgcttctagttgagacagagggtacgtatgttcaaaaacgtgtttactcgagcctggacatccacgtaggccaatcatactctattcttgtcactgccaaaaccgacccggttggaatttaccggtcttactacatattcgccacagctcggttcactgattcctaccttggcggtatagctttaattcgatatcccggttccccacttgacccagtcggacaaggtccactcgcacctgctttgcaagattttggttcctcagttgaacaagccctttccattaggtaaagaaatactctttttttataccaaagaataaaaacttttatatgaaatatttcgtttagtatttgttcttgactaataaacgttaagtgtacgacacagaatggacctgaacgttggagcagcaagatcgaaccctcaaggttcgtaccactatggacgaataaacgtaaccagaacgataatattacataacgacgttatgttatcgtcgggcaaactacggtatacgattaacggcgtttcgtttgtctaccccgagactccgttaaagctcgttgatcattttcagctaaatgacacgataatccctggcatgttcccggtttatccatccaacaaaacaccgactcttggaacttcagtggtcgatattcattacaaagatttcatccacatcgtgttccagaaccctctatttggattggagagttatcacatcgatggttacaatttcttcgttgtcgggtaaaaattacaatatttaaatcataattatgtgtatgatgattaaattaggtgtactaattttatttgagtttaatgttagatatggatttggagcttggtctgaaagcaaaaaagctggatataacttagtagatgctgtttcacggtcaacagttcaggttaagccatatctaatctcgtaatttaaagtattaaaccagtgattagttttggttaattgattctgtgtgtgtttaggtttatccatattcgtggacagcaatattgatagctatggataatcaaggaatgtggaacgtgagatcacagaaagcagagcaatggtatcttggtcaagagctttatatgagagttaaaggtgaaggagaagaagatccttcgactattccggttagagatgaaaatccgataccgggaaatgtcatccgttgtggcaaagttcgataataattaattgtctgaaataataaaacctagaaaagtctattttaattagcaaaactaaagaacggtttaaaggaatgatcagagagtattaggatctgtgttgatcttagggtttgtggtttgattgcgattcgaatcacttgtgtaattgcagaagacggatggtaatttaaagagatgatcttagggtttgtggtttgattgcgactaaagactactagacgatgccgttttagattttaatgggctcacacagttgttatctgcaaaccggcccaggtctgttttgacttggtgagtgctaacgtgctctataagaagatattgtagccacatacgaacagctaacgtgctcccatttcctctatgttcccttgagtgacatacgttttcacaataagttgggagcaagtaatttaccaagaacaaatatatattttaaaaaatataggatccttttacaagttcaattattgattttgacgttacgtataaacagtagatcgaccatgacataaataaaaatgaaaaaataattggatcaaatctcagatcttactacagtctacatctacctagctacatgtgctatggcattatttgtttttcatgttatcatcaatattgtataaaagatccaaacacaatcagtgtgatgatatttttctatacttttgatcattcaaccgatttcaattattgtgtttgatcgtttacatagaaataggtacatatgcattcaagatctccagatcgtttattacgtcttgctacatgtgctatgtcactaaaacaactaagatactacatgcaaagttactgtattcattacgcattgatcgtcttcttctacgcactattattgaatttttgtttctcgatgttttcagaagtcataacatataatcaagggtggttgtagctagtcgtgatgaaattcgaatagtaaaagattcatcaaatggatcaagatttgaaactagaatgaatgatcgatacttgaaagctatcacacttaaatagttaaatggacgatataattcaacaatatcttaaataacattaatcattcactttgtagaaatttcaatttgacggtgctaacaacaatatgtgacatttttgtttgcagcaaaaaagtcaaatggtaaaaaaaaacatttttttaaaaagagagtatagtaaaaaaaacagaggataaaaaacgaacaaacggttaaagctggcaaagatcccatcttccccacgctgtcaaattttgtcactacttcccaaaaaaaactctcccgcctctctctctccctctcccttcttattctcctccttcttctccttcaccatctccagatcccaaaatcttcatcgatcatcatcatcatgagagaaatcctccacgtccaaggcggccaatgcggtaaccaaatcggttccaaattctgggaagttatctgcgacgaacacggcgttgatcccaccggacgttacaacggtgattccgccgatcttcagctcgaacgtatcaatgtttattacaatgaagcttctggtggtcgttacgttcctcgtgctgttctcatggatctcgagcctggtactatggatagtatcagatctggtccctacggtcagattttccgtcctgataacttcgtctttggtcaatccggtgccggaaataattgggcgaaaggtcattatactgaaggtgctgaacttattgatgctgttctcgatgttgttcgtaaggaagctgagaactgtgattgccttcaaggtatatatatgaatcgatttctcccttttgatttatgaatctgctggtgctttgatcatattatctgattgatttgtgaatcaaaactgcaattatccgatggtttcgatcatttaaatctcgtctcgtgagtgttaatgtagttgcatatttagtaaccgatgatttcgatttcagtttgatttttgatcatcttcgcattgcactagtgaatctctcacatatcgtgttttgatatttgattaacgtttctcttcattgatctcttcatggtcatggttccaattacagtttatgaattacatgaacatgatccgtcgatgttcttgtgtttgatttgcgtttttatggtgtttctctcctgttgattactgtttaagagtgagctgttaacacttaatgattggctaggatttagattttgtctattctttatagtaaaaagttaacatcattgaaactaaggacaatatcctaatttggcggtagtgtattagtgtcccctaatgttttgttccagatttgtgactgtggatcaacaatatcacgtgaaaccttaaaaccatatcgaattttataataagaactttagggaatactcttgtgttgacactttcgaggtgaaacatatcactttgtggggatataattgaataagcaagtgggtcatgattggtttcagcaattgttaaataacatctcaatactttttggatctggtttaggtataagggacttctttagttttgtagtacattgtttcacacttgttcttaacatttctgtattacagggtttcaagtatgtcactctcttggaggaggcacgggttcaggaatgggaactctcttgatatcaaagatccgtgaggaatacccagacagaatgatgctcacattctctgttttcccatctccaaaggtctcagacacagtcgttgagccgtacaatgcaactctctcagtccaccaacttgtagagaatgctgatgaatgcatggtcctcgacaacgaagctctttacgatatctgtttccgcactctcaaactcagcactcctagctgtaagtaccatcaaaaccttaatgtttgttactttgttttcttggttcctaaattctaagagttcatatatatatatacattttgcagttggagacttgaaccacttgatctccgcaactatgagtggtgtgacttgctctttaagattccctggacaactcaactctgaccttaggaaactcgccgtgaaccttatcccattccctcgtctacatttcttcatggttggtttcgcccctctcacttcccgtggctctcaacagtacatctctctcacagtcccggagctgacacagcaaatgtgggacgctaagaacatgatgtgtgcagctgatccacgccacggacgttacctcacagcttcagccatgttccgaggaaaaatgagcacaaaggaagtggacgaacagatcctaaatgtccagaacaagaactcatcctactttgttgaatggatcccaaacaatgtgaagtccagcgtctgcgacattccaccaactggaatcaaaatggcttccacgtttgtcggaaactcgacttcgatccaggaaatgttcaggagagtaagcgaacagttcacggctatgttcaggcgtaaagctttcttgcattggtacacaggagaaggaatggacgagatggagttcactgaagcagagagcaacatgaatgatctggtctctgaataccaacaataccaagatgctaccgctgatgaagaagacgaatatgatgaagaagaagaacaagtttacgaatcttgatcttacaacacaaaccaaaagatgaaaaaacacagaagtcacatctctatctcttttattgaaatctctattcctactattaccactatatatatatatacatgtatcaagttgaagaatctgggaaatgtgtttgtttgtttgttactttatctttgtggttctctcttattgtattttgcaacttagtttcttcttttcttctcattgcctttataataaagagtctgtccacgtatctccctctttagccttttatttcatagtattcaaaaaaacgattcttagaatcctttcagtttatagtatagacaaccaaaacattggaaacttggttgcatattcgttacaaaatcctgctatttctgctatataattatcaccccaaaaaaaggtttatcaaaaactacttaaattgataagaagagatgaatctattaaaaagcttcttagatcgaatcaaacctagtcttctttgtcttgcttgagcagctacttggactttatttggcactctctgaaaaccctcctctgctgctggaagaaggttcagatcaaagccacgtcgttccaagttatccattcgcaacgacgccgtttcaacatccctcacattgaccgtacgatcaaccgcaaaaaacggtagttgttgatcgtatcttatgggctgggctattaaaccagcttgctccctaagtaaacctgtctccgcctgtatctccacagaatattatcaaaacggaaacaaatatcaaaaatgctaaacatttttttatacaaaagggaaaacaaaaaataaaaaggtaacaatgaacacctcgaggactgaagaactctgatttttcctacaaaattcttcttctaaaccctttttaatctgtcgtttatatcaaaaacaaacacaaaaaacaattactcaataccaaatttaccacataatgaattttacacagatacaaattagaaaaatttaagaacaaacacaagaaaaacaagtctctgtttaaactgagaaaaattaagacttacgatttgagaattggttttcttggcctcaccggttaagcacgaagaactcgaattacttcccatatcgccgacatcagccatacacggcagcgattttatcaccggttccggcggatgcaggtgagaagaagaagaagacctctttttagtgcgaccccatttatgtaacacaggagaatcagaagagaatatgacaggatgtgaaagttgcaataagatagaagaaatttcgtagtcaatgctatcgaaaaaatcatctctcttcttgcctttgccgtcacggtgatcttccattgataaactctgtgtcttcttcttcttcgacattgaatgaagagagacacgaatgaatagtcttctcttcttcccggcttgaaacgattgggttaatgagataaatctttctcagaagattttgtttgtttttatttttcatataataatttgatgggtctaagcttatgacacgtgtcagtacatttttttggttaaattttcttttctcgtcttttgtttcttattttttttattttcgagtttcttgttttcgtcgtaactacctttttggccaactaatttcagtcaattttggaagtaaaaaaataggattaatccccaatatgtcatgtaaaaaaatacaaaaaattatttttatttctgatattttttcgactttcatatcttttttttatggtataatattaatttccatccaaattgggctttggcaatgggttacaacaaaaatcaatggtggtctctttctttctccaaacttagcaaaactcacacaagactttgttctgatgaagcaaaccaatgttgaatgttatgagcttaacaagtttggtaagagaggtgtgttgagtttttcttaattagtttttatgtttggagtttttgactcaccaagtttcatttgattgttcagtggcaaatgacttgaggatgaaaagaaaacaattctgatttctgactatattagagataatcatcaacaccactagaggaaagattaggagaacaagaacctcataaaataggggaaagtgggattgtatttagatattggaaagagtttagctgtattattaaaaacaaatcgattattgaaataattgcatcaatcaaatctaaaacttcctataacctatatttttataattaaagctctaatttttatttcatctactgtttaatcttaattactattatcgcacgtatattccaaatcaaattcttgaagatcaaaactgattctgcaaagatttggggagtgttagtggattgatcacctcagtacattttaagagcactatactaaattaataattaccactctaactaatataatcattttgtggaatctgatacagtctaaaatcagaaaacaagatatttacatagccgtagaaacaatcattttacaacacataaaattatgcaagaaaaaaatacaaataattatgaatcaatactacacaatccaattataatcgtttaacaattcattacaaatattttgaaatgaacttacattaagtttgaagaaaacctattcaataaagtttctctatgaatacaaagagacaaattaaaccagagtcgttggcttaccacgaatctaatttccacctaaacatacttaacaatccacgtgtcaccgtcataaagtgttaaaacttttggacttttttgttctgtaagaaaaaaggagtgatttttagcaatgggtgcgttaccaatttctccagtttcccactccacatccaaaaaaacagtgtaataataatcataatcacctgatcaatctcttacataaaagctacagatctggttttatacaatcatcaccgcaccaagttcctaaaggtttcgactttactgtttctattttcggaaagagagtgcaagattgaaatcgaagatgaaggcggcaacaaggccgatccacgccgtgacgacatgggttcgtcggcaaccaccaaaggttaaaggttttctcggtgttgtctccgccatgactgccctcgttttgttgagagtgattgttcatgaccacgacaatctttttgtcgctgctgaagctgttcattcccttggaatctccgtccttatctataaactcaccaaggagaggacttgtgctggtatattcgatttcttgattttgaagtttctagatttaggttttgattagtggattagtgattattgaatttgattttcccctgatctgtttcgatttcgaattagggtttgtttgatgctattgaattcgtacaaagttgcaatctttgaatgatatgttttgacaggattatctctcaagtcacaagagctaacagctctgtttttggcggtgagactgtattgtagttttgtgatggagtttgatattcacacgttacttgactcggctacattggtgactacactttttgttatctatatgatccgttttaagctcaaagctagttatatggacgacaaagacaattttgctatctactacgtcgtaagttgttctttctttctttccttttttggttctttttcgagaatctcaacttgtgtttttgaagaatgtgaatcatatatttgaaaagggttataaagtagcaacctttagttccattagtttccatatgtgatcatttttgttagatttcctttgctaatcactttgagtttcattgttgaagtgtttagttgtgaagagtttttaaatatggttgcaggttattccatgtgttgttctatcagtactcattcacccatcaacacatcatcatataatcaataagatttcttgggccttctgtgtttaccttgaagctgtttcagtccttcctcaacttagagtcatgcaaaacactaaggtacttttaaaaagcttgaaactagtccctgtcctttaccctttttaaattagtaacgcatgtgtcgtcttagatcgtggagccatttacagcacattacgtattcgctttggggatcgctaggttcttgagttgtgcacactgggtccttcaggtttgttttctgtcctccaaactagaaagcttgattgtgtagtatataatgataatgtgatgatggtgtaggttttggacactcgagggcggttattgactgctttaggatatggtttctggcctataatggttcttctctctgaaatcgtccaaaccttcattctagccgacttctgctactactatgtcaagaggtaaatcattaatgctttcagtcatcgtcatgtttgttgatacattggttgtagttatgtgatgattgctgatcttaaagacattgtgaagggtgttgtaagtattttatgtttttggtgtgtggcagtttaatgggtggtcagcttgttcttcgtctcccgtcaggtgttgtgtgaaatttggtgtataagaagaagatacggtgttgctttgagcttatggtgtggtgtaatgatccatgtcttgcaggctaatcgttttgagtcttctctaatctcttttttttttttttttccctttatgttttttcttttcttagaggacttgtaaagaaaaaaagggaattaattagagattttgagttttaacatattaatttaaaacttgtttccagaagcaagtagatgaatgttttggtgtaaaatataaacatgagaagaatactatagtacagagagggactatgaatcattaatgttgacctatatacaaatttaaagggtttcaaatatcactcgcacgtctttattttgaaacaagtttttatctcggtttaaattgcataagattacaagaacttgaccaaaaaaaaaaaaaagattacaagaacaagctaaaaaaatagtttgttgaacagaaaaaaacttaacttaggagagtatgaaaatagtatttgaatgtatacattatttggttgtgataacagcgaaaattagatattacttccaaatatatagtttcccgactttatttttcatcaaacgagttacattagctatacgagtgatgatgattgacgctattgtttgtttctttcacttatttttaactgaaaaggtgatcaagtctgaacttatccaaatttgtttttatattcgattcgatcgactcttttggcggcggttacagctggactctgtaatcatatcacctaatattccactattttttttgtattacaattcatttatactaattttaatgaatgcagtagtagatattatatttttgggtgatatattagtatgtcaatccaaacgttatgtgtaaaaatcgtttcgttagaatgatcaacaaaatatcgacgaaacattacgcttttaaaatgaatccatgcaacaagtgtcatgacatagactcgtcttcaaagcatttttggcggatgaactacaatcacaatttttgtaaagtcgagcaagcactaaatgcttctttacaacgaaagtgtacatatctactttaacttatagaacgttgtcttgatcgagtggtacatatctctactgccgacttatatgatctagctctaatcagtaatcaccaagtgatttttggtctagagacttttttgaagtatatttgtggtcattagatgatttgatcggtgtggtatgggcgaatacagattgacgcataaaaatatggtttggcaaaacaaaacaaaaaagtattgtaaaaaagactccacatcctttttggctttttgtttcagtacgtgtttcataaaaaaaaatctaatctgtttataccatgttacataattaaggattcattcagtacaaaaaaaaaatcacctttaaatttagttttttttttttttttgtgtgtgtgtgtggacaaattcacaattttgcttttaaatctacaactacaacatatgcattaccaaattaaaattaaattatagtatacataacagtgatgctatcacaaatcactcactatagctacacaacttctaagttataatcctgcaaaataacattataaatatataatttcatataatatcaatcatcgagccctatcgattatatacaaatggattgggatggaaacaaaagaaaattaaaagagatcacaggttggcaattagctatataacagctgttaatgcgaataacaacacttcacagctgtcttacgaactcacttctctatcactttttcttaattttctttcctttttaatacatttcagcaaataaaggttacgtccatttttgaatctaataaataaaaaagtgttctatctctaaattattggccatcgagatatctaaacgacaaattttgttataggaaatgactacttgttatgatttaggattcatatcgtcgtctgttctcttaggttatgaattctgaatttctgatacttattctcgattgtattacatatatatatatatatatatatatatgaccctgattagtatataaactgacaaactgttaccataaaaattaaatgatattttttgataaagtttgattaaaactaatgttactattgataaagtaaactattaactatgtatatactgaaaataatgtaagttgggtgcaaatattgatttgacttaacataaagttcaatgaaacgactaccatgtccataagtatgatattatatgccagccatgataatggaagtgacattttcatgcataaagaaacatgcatgctcctcagtttttttagttttttgatttgttaaataaaaaggctatggtgtagacttcgtgaagaatgtgtgttaagtgtgcgtgcgggcgggatggggtttggagtcgataaggttggtgaaaaagccaaacactgaaaacagactatccgtgatattgacctctctctttcttcacctttccagtttttgtctattatttcgaaacgtcaatttgtataatttgtaacattttacatctactctactactgtctattatttcgaaacgtcgatttgtttctattgatattattgggtaaacattttttttctttttagagaatagttaaaaatgttataacataaccaagtgaacctaactttttatcgactcatatgaacctaagcatgatttcgactctaataataacaacgtccaaacatatcatagaaattagtttacatttgtatataactatatatatatatatatatatatatatatatatatatatatatcaattcaaagaaacaataatttcggtgttggagcccaatttgcttgttgcctagctaggggtaattagatagggacaatgcgtaaatttactctctcttttcttttgggttcagttcctattattgaaacaaaaattacatccaaaatggatataggagttgtgaccgtatgggttgtcgaatggttgtgttatatacttatatgttatttgctaaacaaagttcatctagaacctccaattcaaagccagaaatcagttaaaaatcaatatttgctaaaatgttgattcggatcattcattcatttttataaaaaggaaaaaaattaatcggttctggttaacggtccaaaaatattatgtagattaaatatatataacttttcggtactaaaaaaaaaagattaaacaaccaagagtggaaacgaaaagaaaaacaacaaagaaaagatcatggaccataagaaaaatactagtaatacttaaaaccaaacataaagattgatctagaaatcggtttaaaataaaaataaaaaagaggaaattagataaagacgaagagtgggtcataactcataagaagaagtgcaagctgtgaaatgaagcattcgcaaaaaggaccactcacgtctacttcctctcatccttcttgtctcaaccacatcaactctcttttttagctccatttttgtcattaattaattaaccatacttacaattttaatgtccttccattttctatttttgtttcttaatttcctcaaattattgtgatggattcccaagacaacggagatcaacacaaaataaaacttgaaattgagcattattgacatcatccatccataaccatatagttttggtctttcaaaattgtggtgttttccattttttcgcagatcacatacatcgtatgaagagcgttcatatttcaaaaccggaacaagaagtcattgtatacgtcaagatattagtttatgttataatataacaatctcataaaaaaaaactcactatggaagtcaaaagtcaatcgttcaacttacttattatatttacatatatcaatgaatcaggattttttggtagaaccaaaacttaccaaacccaagcgacccaaactaataatagagtttaggtctaagtacatcatagaagtcaatacaattgtacagtaatacattggcttttagtctacttctatctaaagcaagattcacataaacattgaatttcatacaatttaataagtaaaaattcgttggaaaaaaagttataccgaatccattgatcaaagttaaaacaagagaccacacataatacaaccttatttcccccaccaaaatattctcatctccgcatactcacaacttttatacgcaccaccaaccgacccattttgaaaaagagaaaataaaccacaaaaacacacataaataatatgctgataacaatgtcttaaaaatctatttaccatttctagtaatcaatatctattgcaaaaaatatttataagaatacaaatgaaaaatgataaaatacaaatgatttctcaattacctaaaaaatataaaaatgtcttactttattttcagccactgttggaaagtacttgcaatcatatcgtattttgaattataaaactcagaaacaattattttccctgaaaagttaaaacttttaataagatatttataaaataaaaagaatagtctagaccgaaaatggggtcggttgtccatccaaaggagtgctataaatagaaccctccaagttctcattaggacacaacaactaaaaccacatttatcattacagtctgatttgagctaagttctctcatcataaactctccttggagaatcatggctatttcaaaagctcttatcgcttctcttctcatatctcttcttgttctccaactcgtccaggctgatgtcgtacgtctttttcatcacaaactaattatactcaatataatacttatgttttcaaaaacatatttctcacatgttacaacaatattcttgcaggaaaactcacagaagaaaaatggttacgcaaagaagatcggtaattatatgatttttattaaacctaacgttaaatttagagtgagattaataatctgtgtttttctttcttgtatatatagattgtgggagtgcgtgtgtagcacggtgcaggctttcgaggaggccgaggctgtgtcacagagcgtgcgggacttgctgctacaggtgcaactgtgtgcctccgggtacgtacggaaactacgacaagtgccagtgctacgctagcctcaccacccacggtggacgccgcaagtgcccataagaagaaacaaagctcttaattgctgcggataatgggacgatgtcgttttgttagtatttactttggcgtatatatgtggatcgaataataaacgagaacgtacgttgtcgttgtgagtgtgagtactgtattattaatggttctatttgtttttacttgcaagttttcttgttttgaatttgtttttttcatatttgtatatcgattcgtgcattattgtattatttcaatttgtaataagattatgttacctttgagtggttgtttatcatactttttttctatggtaagaggttttggaaaagtatcgagaatgatatataaagtaattttgatatcgacgcaagatgataactactagactagctgagtataagaatattgatgtatatatttgcggacaattttgaatttattataccattatttaatcacgaccatataaaaataattcttgtttgcgttataatttgtgttaatacgatagagtagacaaatgaagaccgagaacataaataatcatgatcattacggatagaattttggtataagatatttgttaacatcgatatttatttgacagccatataccttattccaaaatttggtccacacatcgaacctattacctatgaatagcatatagcttatataggttcgtgtctaaatgaaaataaaacaaaaatatgactttagcgtatatgaattgatgatagtaaagtttccttaaatctagcaagaggaagtaaactgatttggtaaatcccttgtgaaaactgaaaagttcgttttgttaaaatcatcgttgattcattttggtatttttcaaaaaggaaaaaataaagaactgaaagcccccggcgaggatcgaactcgcggcctttcgcttacgaagcgaacgcaataccactatgctacggaggcttttcgataatctctgacaatcttggcatatttaataaaaagcttatgagaaatgttggggactcgcaagttttgtagcatagtcattgcattttcagaagccaatgttaacagaaggccttttctcacgtttatacgtttaattcgtctactttctaaggttatatctttcttgggccattgttcgttatatgggccttagttgtcacatgagtgggttcttaatttactcaactcgtatttatgagaaaattgtccaagtgaactgataatgaaatttgcacgaaggagagagtccatgcaaaaactgaaaaaagtttgacaaaaactcgaaaaagtgaagccaacataaaaatctttggttagacactaaaacacagtagatgagtagacgtttggcgaaattcacctgacttgtcgatttcaatttgatgacgtggtcaaatgatttaacttacaacaactaataatagccgtcgattttaataaatctccactagttatgagcattcagaaagccatgccgtttcttgagactagaggattaattaaaaaaaacgccgtgacattctctcgtagttattgaagacagccagacgtttgagtagaaagggacccgcccgacccggttaacgaagttgatcataattggtttataaatatggttgcggaaaagtacataagaaattcatcaataattctagtgctcaatatttgaatatatatcactgaagtagatgatgcgttcagaaatattggatgtttagtcttaattaaacgtatatgggtaaaaattgattttaacaaaaaatttaatttggttagccgtttagtcattaaattatttggtgatagattaatttgttcattttattaaacattcgtaagtgaaacattatatactaaaaaatcggaaatgaaaaataaaaataatgcaaagtcgtagtacggattcaaatcatcgtcataggaaacccatgtcgtcctagtacaatttttttcagctctagcttgctgacgtgtctgacacattgattttctaaggaattacgtggcacaaacacttaaaaataatcagacggttctcgtatctccttgattacacaccgttggatcgatgactgaggaagataaaacgaaacagagagagaataagcgttttgttttgtcatattttgtgttttgtcatattttgtgtgacatttacaaaaagcgatcgagtgagtgaagcgacagcttcggattatccgtcttatcggaatgtggaaactttgagaaaatacaagaacaactcatagagagacacacaagagacgtttttttttttatctcttttctctatttgaaatctctgaatagcttctgtgtttttcgatgatttgtactgtgtacgtttttttatcttcttctacttcttcttcttgtgtcagttacatatcaatgtttgatttgattgaagaacagtgactccattaatgaagctttccttatagtaaatgcttttttcgaaaaaaatcaacgatctacattttttttttttgtattcacgggttgaatgtacaaacattaataataataaaaaataatttcttctttaagtcttcttttttttcttttggctttatttgtctcatctcttttatttcacgaagaacctgattcttcgagacacgagaaacgattttataacttttctctcttttttcttttcctcttctttaacgtctttttacttttctctcttttctcttcttcttttgtgtatctatctaacaatcaaagtgtgtgaaaatcgtaagagacctttttttgttttgcagagagatgttgaagaagtgagtttttttttgttcttctctattagtccttcttcacctcttgcttgagtggtgagaaaaaaagaagatggaaatgggtcgtcgagatttgatgagacgtggaacaaccaatcgattttccaataaacaacaatctggtaaagattcaatctttttagtgtcagaaaccaacaaaatataaaaatctttctttttttgtcgtcgtttgctctgtttttttttgtctcacttttgttttgtattcaactcatggatttaggatctgggttttctacaaaatctaagaaaggaatgctgaagaaacttggttttgctgatgagaaactgaaacaagagatgagctacgatactcttccttctccagatttagaaaacgaggtttctaagaagaaatctaagcttccaaaaaaggtaacttcttcatcaatacgacacctaaattactctctacaatcccttaaatttctcacctttctcctttatctctatagtctttttcacattaaatttctctcttttttttctctctctctctcaacttagaatttgaaagacactaatggtgtggatcatgcctctgtaccacggaagcttcgttcaggtgcgttgttcgtgactcattgagataacttgtagaaaccaactttaatgttttttggtttttcctttgtaaagtcgtgattcatatgtgtgtgtgtgtcagtaaaaacttagtagttgagaagattatggtatattggcttttgaatctgtggagattttggattatttttcaagcaaactcttttttctttttctcactttcttattatggacgcaagattctgctacttgtcttttatcttctttttactacttattaaaatcaaaagcttatcaatcttcaacttataatattattttcattctctttcttttctttaaagcttgtctttgtcacttttgtgaattctttagcatctctttttgtgcacttttaattgcagccatgaagaagcggaatcttgaatctgtttctaagctatcctctgtttcaaagagacttaaccggtttaaaaccggaactgaatcttcggttaagaaggagagtcaagaaatggttggttttcttctatgatgatgacttgtgatttttgtaagaacataacagtttaccttaagttttgagtaatgatttttggttttttttttttggataggaagcaaaagctatcgttactgagtcgatgatgatttcgaaagatgagaaagaagttgcagagactttatatggtttagctggaatgtttactgagactgactctcttggtaagaagactagtaatgagaaagaaaccagcaaagttgttgactcaattttggttgtggaagatgactatacaaaaaccgaatcgcttacaccggtggtttcagttctctcttcagccaaaactaagcagattgatgcaatgccattagagcaatctgataaacagttcaacacaacagggtttgtagctaatttttcgtttaatattgtctttcgaaattttcggttttactctgattggtggtttttgttgtttaattttacagaatggttgatttcattgatagattgaagcaaagcagctcagtgaaagtgactgatgcacatgtaagtactctgattttctaactgaatcttactttcttggtttaagactagattcatatagccaataattccattgaaatttttctaggcaagagtcaatgaaacaaaggttacaacaagcaacggtaagaaattctacctacaaactttgtatcaaatactgttcagttactgacttatgttcttctaaaaggtcttgctctgtggcctggcctttcttcaacaactgttcattcaggagctcaagttctttcaaagtaagtcttaacctttaaactgtctgttaactttcgttcgtgctgctaggtttcttctcttatgcgggttttctttcaatgatcaggccatcttcaacaaagcttccaccgtggatgggtcaagctgtttctccttccaatactgcttcactcttgaactgtgaaccattaagagtccagccgagaaagttgaagagatgtgcctctcatatatacatttcccgtctcattaaagtattacagaccagtaagagtagtctcgcaacacttaaccaaaacgagcaaagatattcagaaatgtcagaacgcagactccctgattcagtgataaccattaatgactttaaagcaatagtttctccacctaagaggtatcaaaacccgcatctgctcgatatgcaccgggcacataacccaaaacccgtgcaagaagacatgactaagcttgctctcgagctctatggtccacacacttcacagaaacaagtaatatacttcactcttcttatccagttaattcatttcctctctgattctaatctcgttttctattttaacgacagagctttgatttcctaagtctctcatctgctggagcagcacaatctcatttcccacttccaaactcatttccacagtatcaaatctctgcagcttacaatagccagctctcacctgctacttctagccatcaggtgacctaaatgatctctcttctgagcaagttaatggtttcagttagtagtataacacaaacattctttcttcttgtaggtgcagcagctttctccttatctagccagtcggttccagaccgcttacaacgcaaaccagcagcagcaacaacagcttcaaaaaaggctatgggctgctcagtacagaccaacaaatggaaacaccatgcagtcgaaccaatacagtaaaccaaacctctccttaaacctgactagtattcaacaacctctccaggtttcttcctccccaaggtacaaccacaatgtatctcaacaacaacatcgtctcatgactgctgctgcagcaatgtcaatgagccatcaacataataatccatcacgggcggtgatgaatagacaagaacaccatttcccacttatatatgaagatacaaggacaccgttgcaactactctgcaatgagcaatcgtgaagctgcctgtttgctttatagttaaatagttctaaggattttacagatagttgagaaaaaaacagagatcttcgccggaatttgagattctagatggtgatgaaaatccgatgaacaaggattgtgagtgagagatgattgatcacacttgtttgagaaaaccctataaaaatgtcttttaatgtaaatgatccacgagttctcaaaagaggcaaattttgtcgaggactctgttatctgaagtgagagacagtcacagaaaagaaaaagatgataggtttttttcgaatctctttccaagtatattttaaaagcagcatttgagtttcttgtgcagcaagcgaattgaaactcgtaggattataattttagtgtcttacactgtaaatacaaaacagtgtttttggaaaataaaaaataaaactcttaaaacaacccttattatgaagctggtgaaaaaaaaaaatctatatataccaaaaaaactttgaaaaatagaaaaacaataatataattaataaaaaagagtatttaaaagaagtgtagatgaagaaaataatatgctttgcgtcgtctctcactcaactactcaagtcacaaagctataagcaagcttatgtatttcttagcttcgtcacagaaagctaattaagcactaactagccataaatgatggagacaacgaagagagcagagatcgacacaacggcaccgtttagaaccgtcaaagaagccgttgctttgttcggcgagagagtcttagccagtcaagtctactcgaaccatctcaaagtggcaagtctttagctctctctctttgtaaatttgaactttgtattattgtttgaatctaaaaacttatgataataacattagtgaagatacagatgcatgatgagaaatgggaagatccatcagggattaagatagagcttcaagagacaagatatgatctcaaaagggcaaaagaagaaagcatacaaatgaggaactctttgtcttgtctcaaggaagagcttgaacgaacaaaacaagagctccagaagctgagagttgatcctggggtaaacgaaacgaaactcgacgagactgtttttaaaaccaagtttgaagtgttagttcctcgggttgatgatgagccaattagaagtccgaggttgagatcgatgagtgagaagagatacgtgaaatttgcaaaccctactggtaataatggctcggtgtttcttgagagacatccttcaatgaaaaagaaggagaagaagacaaaggataagaagaagaagagtttaatccctttgtttattggagggattttttctaagaaaaaggttttgcaatgaaacagattttgttttccgacatttcttcacttttatttgtgtttttttcttggttttgataataatgtcacatgtatgactttcgtaaattgttcttgaaaatatttatcttaatttaatccgctcgtttttttttaattgaattattaactattgtattattggactatttagtcaattcgttaaatatttgtatttacacatacaaaatttgcaacatattttatcttgtttaaaattgatgaaaatgctcgaaatttcagaagaaactagaaaaaagggataatttataagtttgaaaatcacaataactcaaacaaaataaaagcaaagcctcgaatcaaatattggagcagaaaaacaaacaagtgagttttggatgttgactaaacgtaataacagtcacgatcgatattgttaacaaggcgagcttcatgatcttcacaagacatagcagaagacttgttgaaaaactctatgcaatctgcgatagcttcactgtagtgtacgtgagacgaatagtacgaactactacacgaaatcttcggcggctcaaacctttctccatcgccggagcgggagttgttcttcttctgccggcgagaggaggaatgaagagtgaaatcaatgagcctcatgaggatctttcctaatttgtggaagagcttcatgatcaaattgatcgtttatgatcttgagggtttgtctatatatgaatggtgaaacctcgtgtatacatgttttgataatttaatatagaagcattcttaaattcttatttttaaaaaatcccaagtaaatttgtaatgattcatcaaggaggaaaaacaggaagaagaatgtttcaatgattaaaccaccaccaaagaatttcttgagatgtgtttatcctatgaagtatgaacatatgtagggtccatcttaactatcaatatgctcataatcctatttaaatgtctcaatttttttggtttaaattgacgataatttcaggagtgaaaataaaattataataaaccttgttcacaaaatctataagctatgtaacttgttcttttttcccaacatttaatattgttagtttttagaattcgggtatatcaacttttttttattagttactccacagactagctaatagcctaatactatcattttcttattcaaatgtgactgcattgaacaatgataaataaactcctcgaatattgatcaaagtagtgtacaaatgcatgtaacatttgaagacaattgtcagtatcgtttgctattaatgctaatctaacctaagataccacatgaacctagctagactgaaattttcttcacatttaaagctttcaatgaaataaagacaaagacagaccaaggaacggatcaatgtacgagtaatcatagattgatttgccttataattaatgcataattaaagctgtaattagtgattacattcagaaaagagatttgtggtcctgcattttacacttgatcactttgacctagttttagggcacattatattttgggaccagtaagtaaacactcaacttcaaaaacgttattcgtagaacaaaacaagagtttatttaaaccaaaaataaaggtacatagaaaaaggcagacaatgaggaaaacaattagagagacatagaagaattaagaggctttttggtgaaatgattgttggattaggattctttttataatcttaggttttatgacggttatgattatgtcttgcactttaattcttccttaaagttaaaaccaaaccacctggataactcataaatagctcaatagtttattagtttcgtgaacttttactatgtcggagaattttgtttgactgattcaatttgttgtatctaatggtgaatttgcatagtcaaagagagactacaataagccaacgaacagacatacttgcgaagcaaaaaaacatcccttatgtctctttgttcaatttgtcaagctttacatcatgattatatcgagagctataatccttaataaagaagatgttaccaaaaacaaaacaaaacagaacaacttaaaaaacaaaaacaaaaacaaaaagactactgggtcgaattcaattggtggacctttgagtctggattctggaaaatgtatataaacttcggcccaaatcagttaatgggctaagtctaacaagcctatttgagtttacacgtaaccaaaaagaaattattttttgtgtgttttcattctgttgattggtgacaattcaacaagagcgcgcggtacatcttctacaacatcggtaaaagttaccaatcaaaatctatattgttgttgatggtaaaaagttctaagtttataactaacaatttattaaaagataatcacttttgttgttttgtaattgtagatgtctcttggttataatcaagtttccttattacaagttcttgatttttaaagccacctcaaagcactagtggaagcaggaaagaaatgctagtttttgcggtgatctacttctcgtttggcagtcattgatattcacagattatcactaatgcactattttgtggtgatctgaaatcatttacaaacacacttcaacaaaacctctcacaacataagactaaaagcagaaaacaccttccctttggaatttatcttgctgatattcaaagcttcaaaggcctcaattaatgtaaaatgtttctgcccactacagttgcatcaactttatatccatcttttaatagaacttctgaattttaacctatgctagacatatttgttgtaaaactcgaatattaaactggtttgattctaaatctctgatttcatttgcaactccaaggagaaatcgagttattataaaaataaacaatgtagcagcttctgacaacgaggaaagttccaatggtgcaccctctcagcgtgcaagccttttttatttatgggtaaattttgaacttatctgaaccataccatataactactatttccttcttctttttttgacaacactatataactactaaattaaaactatacaatacccaacttttacaaaatcagctttccctataaatatttcttaaaaaataacgaaaagaacttgggtgaataaaataatttactgaaaacgcatgtgatagcaattatatcactctgccactcccacactatttgattcccaccaagtgtgaacacagctatgaaatttaccatagttaacaaaatgttacatttactggtcaaaaagcctaaattgagaaataacacgttaagttcatcataattcataatcatgatttttaacccactcgactactgaattcttaacctaatcatgattttcaataatagagataaccaagaacatattagcttagactcctgagaattacacttaatagtcaataataagatgggaattatgatgcaggttgatgattatccctaatctctccctataatattaaaaagttagaagtacaaaaaacaaacattatttctcaagttaaaattacaaattcaagattctaaaactttgtaaataaccacgaagcaaggtaatatagctctcgggttataaaccacaagctcctcaagattcgaataaactccagcattgaccgccaccgagtcaaacgtaccaccactcgaagaaactccaaccaccgagttatcctccaccgttgacttcttctccgctgtagccgaagcatccgccgccggtaaatcaactcgcttaactctcccagcgatcacacggcacacaagcatcactctcctcgcatcatcgctacacctcagcaaatcatcagctcttccgctgctcgccgtcgtcctcacaccggcgtttgcgacgttggctcctccgccaccagattttccttggaaaccgtggcgaatcacggtgcagacgccacaaacagggaggttagagcagagagaagaagagccacgagctccgagtgaacaagtgagagtggtgcagtgaaaacgtaagagctcgttgccgtcggcggcacaacgagcatcttttctggttgcttgaagtgcacgcgccttcactgcgtctcggcaatcctcaaaccgttggatcgtacgttgagtgttgtggacttttaatatccgttcgatctgacagatgggactgtcttttttaagccagcttgatttgaatatgatctccactatgtttcgacccgaatcctccggacctaactccgaaactgcaattaaacgacaacgtttttgctcataaaatcaggaaaaatatgcaagtcaaaacaaaaatctgagtttttgggacattaaagacagttctataattcggtttttgtcaggtgaggggttttaattctgatactgtcgaattgaaaaatgacacgtaatatttcagggggacattgaatttagttaagagcagagacagctgtttctttttatagtacaatggtcccatcgcatggtaagtgtttccaagcaaaacgacggatttggagaccatagaatatatcttgttctccagttatattcctattctcttttgtatctttctctaaaaatacgtatgaatctctattccaaaaacaatctgtaacatacggccaaatcatcctaacttatttgatcgatataatcaccgacaataacactgagatcttgattccattaagaaacaacgaagtctaagatatatattaatgaaagcatgttcgttaattatttgcttagcattatggtaaatctatcgataaatccaagggcctatacgccggaaaacatgtgttaatgctaattattcaatcaatactaaacaaacaaaggttgtatcatcattcacaagtcaaatcatggactgagatcttaagtttttttccaaggatacaaaacataatcttactttgccaagccattcgcatttacgaaaatctcactagatacttagggttaaatttaaaaatgtgactaccacacaccaaaaaataaaaaattgtagctaaagcgtaattaattaatttgaggtaagtgataaagtcaaacaatttttgttaaaaggaaaaaaaaagccttacctgcgtgacgaactgcttgatgaagctctaagctttcaagcttggggaaaacttctccacattgggaacaagcacaaaccctaggcgaaatcggatacctaaaattcaagaacatgaaaatgaaattacaaaaatataattcagaagaacatttacttactcataattaatttttggtgtcattacctgctcgggtcaacgatcatgtgacattcgtaacatccggagagtttacggaactgcatggctctaaacgaagtcgttgacgatgacgtgtaactcccactggcgttagatctcgttgagccagatgtaagagaccgagacgaagaagaaccgtgttgaccaggtttccgagtcagaagccgagtctccgagttaggagtagccgagttacctacgtctggtgagtgatcagctctatgaaccacacgagtgttgccgtgagccacgtctctaaagctgcaaatggagctgcacgacgagccaagcttggaaggagataagttagttgtcatggacggaccagattgagagttcttggaaggatcatggactcttgacccttcgatttgtttgcaagtcaataggttcttgatttggtcccatgaagatggctgcttcggaggtactgctttcttcggtttctgcggtttatgtttctgtgtctgcgtttggtcggtgggattatcgcgtttctttcgtttgctagacgttggcttgtgtttttgtggcgcctctgcgttctccggcaagaaagttagtaaagccattgaaagaagaaagaaactcttgagaatgtgagagtttcttttgtgttcgtctttatggttctttaattataagcttttatttttaggtgttgaaatcgaagatggatccaagatgggtaataaggagggaagaagattaaagtagtgggctctatctttctttaattctttattttacagttttactttcttacccttctgattaatattcttgtcgttcgaatttattaaaattataatcttttaatagaaaatagggtactaatttaactatattcagatatcttgttttgtcagagaaaaatatctttctaattaattttggcatctggttgcttgctttgttagttgtggattttcctcaaaagaaaaaacagtatttaattatggattttggatagatagtaaattacttttttgatgattataaattagttagaagatcttgaagttaatttttttggacgagcttggttggctttgtatgtgctttaactgcttcatctataatcttccattacagtttgaccttcttaaaggcggaattagtcaacgtcactgatgtttatattggtagtattgatttgtttggttattatactcaaaactttgaatggaatctctttattaatagtcgttactacataataaaaatgtataagttcaccattaaaacaagtttgatgacagaaataattagttttaaaaatcaaagtttggagattccatgaatgcaagcaagacaacaagaaaagaaatggaattaattagtacatcaaaaatataataataataataattctaaaaatgatgttgttgatatgtatggtcaaaagtatttttttaacagaacaagattacacgttaaacaccagacaaggtctttggaaacttcgtatttggaactgtgattacggattccaaatgttctatttgtctcgatttgaaaatttcaatgctcttaattccttgtttcctaaatagtttggtacatttatatcatttttacttcaatagtttttggtctcagtttgtatgtaagtatttcagatttatgcaatgtattacttcatattgatagactatttttttcaaagtaattaggatagggtgtcataaactaatctcagtacagtaaatagaggtggagttacacttgaagtttgtgtaaaaaagtatgggtgtaaattcatttattaatatactgattatcataaaaaacagtttaatgcactaaataaataataatttaatgtgtaataaatgtcgacattatgggaagaacatttttaatgtgataactcaagtgagcttgtatatttttagattgtggtaattgcgttcaaacacaacacacaatttcgagtaattatattaatcattcatcatcaataacataaaagtaaattaatcatatttagggtgaaaatttgtagcaatcaaaagaaactacgattttaaggttgatcgttgactatatgtaaaattctaagaccttcacattcgccgcaatacttggatttatcacgcagtcgctttggccttctcacttgtcgtgttccacatttgtccttctcttttgttttaaactttggttataaaaatcaccagagattgttataaagtcatttcgtttaaaattttgttaaatatgttatgttcattgagacaaaagaagaaacgaagcgcgagatcttgagaatatgtttgattcataaacaagtttgaatttcaaaaaacgaaaagtaaagtagtaattgtttacgtacgtaacatttaaaatactattgttagtccggtgacaatggaatttattcgactgacagaaaatttaatcctactgcatgttaaaagagtctctactgacaacgtggccggttagtattggcttgtgattaatagttttttccatttataacttcaaaatcgatataaatttaatattggtattgcccatcttgtattgcagtaaagagaaaccttccaattcccaatttgtataacttcaagtgctttgaatatgccattaaatattagagccacgaacgatagctgatttctaaaacaccgacagagagagagaaagagaacttcgtattgtacacagttattttgaatataaatcgtatcttttccatgaattttctcagatatgttttgaaatttttgtaagatttcagatatttttgtgacaaactcaagaagatacctctctagatacaaaatggtgttactgtgcctaatgtattattcgtttaccatgttataaaatgcacgtgtgatttggggtatgaaaagttggcaaaacggtttaaatatatggaaaaaatagagacaattgtgtccccatttcatatagtcataatactttatactgttcatatccattagtagaatttgcatcacctttgaagtactttactgtatcacgttccatcttctaaagcaaacttctactgtaaaagtttacagtaaaaccatagtcatatgcctaaaggaattgccatgaaagtgttgaatacattgtgatcatacagtatatatgaaaagcatgcggactattttgatactagaaaccttgtaacaactacaatgtatttcttttcaaacactcattctaaaatcaaataaattgtagaaaataagatgtgagaaaatgattctggttttggtctttaccacctataattgtgttatcttttgtttgttatgttgctgttttggttagaagtagagtccaaattaggagttcgcatcagtttggctcatagagaatcaaacaaattggtgaaaaaagaagaagaagagattctagctgacactcttttgtttcacactgaatcatacaacaagcttcatatcaattaatgcaattgattgagtagatagatatacaacaactatcattcaaaaatggtccctaatttttatagtaaattcatcaatcattcggttgcatccttcttcaattattgatttctctacacaactcattaatttatgaagttctgcattcgttattgataaatttggtaatttgtacgtacacatacaatgccatattggataggccatctctagaatttttgtaaatatttatgtgtttttccacacaatgatgatatgtcacgacttgtagccgtgtggtcctctggttatgtatcatttttgtgtaactcctttaattttattatttactttgcagagtgttctttttttctttaattctttttcttttgggataaaatgtaatattgacctactagtgtaatttttttgaattttaaaattaaagatttaggtaggagatgtcagagcgggttaatccgtcccatttaacctaatttacaacaaattgcgatactttgcgagttttgacggatcattccatcgaagacctcgatattcaaacatcattctaaatcctactcaaatttcaattgtctcttgtactcatgtatttcatgtatgagaattatttcactgtctgaatgggttatggatactactgatcataaccatatcgcaaacccattttcaaacatctaagattataatcctaatcagatgtatacggagcaccactagatttaagagaatggggacataagctggtaaagaattgggccaccattaaacgtgtgaaagaagaatttgggtttaggcccatatcaagctagattctcatgatacttggttaaaaagcaacctttttatttttctccgaagcaatttacatttgagattcatgatttattcatagtaacgactaaaagaaagaagatgatgcatagttagttagtacagtgtgttttccccaatagtttcccacgagtcaggcttaacgttttcctctcgaatgactctacgtacctcatttagtgacttcgttttctttcaccttaagaattggatcatcgagtttaggtattgttgtctctttcttttcctgttcacaaatagaaaaacgagcaagattttttattgaagttcactcacaagtcaaatgttaaaatgaaacagagaagagtagagaggtgaagaaataaatatacctcagccttagattttggtgttgattgttctgtgatatactgtaagatctcaaagaatttggtctgcccttggttgattgctttttggagatatatcattgccatatccttagctctagtctttaccttcaccaagttgcggtcaatttcattttcatgctttgctatatatggcctgaagaaagaatcgtaaacgtatgttgttccctgaaatgatataacacataggtaataaaaattagagaaaaagtcagttgaatcaaaagatatataagatattacttactttagtctttggaaaccagagataaatgaagaaagccaacttcgcctcgctatacattggtaaccttcaagacaacatgaaaacataagaatactaatatacaatactgtaaaactctttgttttctaagtaatataaacagcctaccaagaaacaagagcatcaccaattctttcgaaaatcgtcaaagcagctacaataatcctgcaaagatgttttgagtggaaggaagcaagatttatataggaacctaaaaaggttatagataaaggatagaatgtatgcatataccaatactggcaccagaactgaagttgttgaatttcaggcttgttgagttcgaccgttttgaagcactcataagcaggatatgcatatccaaacaccattctgtcaataaatagaaagattcattacttagtttgattgaaagaaatgtgtgttttataaaattaaaagaagagatcaataacatacaaaagccctcttgtcagaaacgatccaatcattgtgatcacctgctaaaacgtttaaaaaaaacaaaagaatctgcttgtcagaattaaattctcgaccccgattcattgaaatgattatatcatccaaaatacaaaaagacagagacaaaacaatcaactaaacaatattgatgcatgccttcaaacgattacacttcctaaaggctaatatgaagaagaagatattaacggtttaagcgattgaacaataacacataccttatcagaaaaacggtttcggcgaaaaaggaatgagaagaatgatttcgaacgaattatagacgacggttacgtacgatagtgacttgcgaatggagaaacaaaagatggagaaaaggcgaagcaaaacggtatcggatagtgacttgcgaatccttttttcatttgttctctacttgtgagtttcaacttgaaacagtgcggtttttaaatagtcaacaatcacgacttttagacgttatcagccgttggatttatacttgacggttgtgatcgtctacgtttaagcgggtgtatcgtatctcaccacaccgtatcttgttttcctcttctccaatacgcttcggaaaactggattacagttaacagtggattagtggataaggagataaatactaaatatcttattaagccacgtgaacaaatcttagccatggaaacataatctagtggctgagattaacccaaaactactggttcttcttcttcctctcatccatcttcgcgcgcttaagcgattctctgcaaagcttcataccaaacaaagagaagtcgaaatgccagtttcagctccatctccgcctcgtcttcattctccgttcattcactgtcccatcaatttcactccttcttctttctcggcgaggaatctccggtcgccgtcaacatcttatccccgaatcaaagctgaactcgatcccaacacggtttgatcctcatctctggctatatagactttgttctcttctcactagtttttattgatgaacgattttgattatctttctaggtagtcgcgatatctgtaggcgtagcaagcgtcgcattaggaatcggaatccctgtgttctacgagactcaaatcgacaatgcggtgagtcttctcattctcattgttgaaaatttgataccgttttggcaatgcttctaagtgagtgcattgctgtggaataaagttaacactgttttgattttacactttcataggctaagcgagagaatactcaaccttgttttccctgtaatggcaccggagctcgtaagtggatctctctcaactttttgttagcattttggttggatttgtgtaagagcaaaatgtttgatgtgtcgaaaatgtttataaacatattatgatgtttctgaagaaatagtttctttggtggtggagcagagaaatgcagattgtgtgtgggaagtggtaatgtgaccgtagagcttggtggaggagagaaagaagtctcaaactgtatcaactgtgatggtgctggttccttaacttgcactacttgtcaaggctctggtgttcaacctcgataccttgatcgaaggtactatactatacgattactgtgaatcaggagccactctgttttttgcacattgtagagatactaacacatttctcttttcttttcttttcttctggtcagggagttcaaggacgatgactaaataccttgctctaaggaacatttcttttcttctcccttctcacatttcttcattgtacaatgctgttttgttcaccaaacatgttgagagaacatcatgacatggatattgtaattgtgaaagaaaaccaccagagttcaatcaaatgtttcttcttgtacttacctagtaaccatgtctacctcgtcaagcacattgattcagtttgtaatactaaatctatcctcttgcgttatggaatcagctttccttgacctcaaagcagttaccatgtccgacaaagcgcctgccattttccccaatgctgctggatcaaatatggctcggtctcaaagaggtctttgaatccggttcactcttcctttttctatccaccaaatgtgtgtttgcttgcgctacaattggtgatgatacattgtctgttgccaatgactcttctgaaccctcaaagttaattgattacttactgttgaagttaagcatatcatcttttttaatttgatttaatatttttcttcataggcatagtggcccatatttaacctcacataatcaaagtttttaaaattattattaaaaatccaaattgaaaactttaatgctaaatctacataataataggaaaaacaagttgaatgtttggaatcgcttacgactaatgctggatccaaaatccggttagttttcatatcattatgtaaatttaatatccaaacaaataaaaacattaaagaaaagttttttaaattctgaaaaaaagaaaaacaaaatcaaaatcttaaaaagtatttttaaaaatccgaatgaaaaacttgaatgctagatctacataataatatgaaaacaagttgaatgtttggaattgctaacggctaatgctggatccaaaatccggttaatttttctatcattttttttttggtaggctattttctatcattatataaagttagcatcctaataaaataaaaaacaaatataaaagattaaaatccgaaaaaacaaaatcaaaattttaaaaacaatttttaaaaatctcaattaataatttgaatgctaaatctatataataatagaaaaacaggtcgaatgtttggaatcgctaatgacgaatgctggatccaaaatccagttaattttttttttatcattatataaagttagcatccaaataaataaataaaaagacaaacaaaagagaaaaaaaaaaaaaatccgaaaagaaacaaaatcaaagttttaaaaaattatttttaaaaatttaaattgaaaacttgaatgctaaatctacataataatatgaaaacaaattaaatatttggaatcgctaacggctaatgctggatccaaaatccggttagtttcgtatcattatataaatttaacatctaaaaaataaaattaaaattaaaattaaaaacaaacacaaaatatatcaaaatctttattagaaaaaaaaaaaggaaattaagaatcaacgaacctgactcatggtggactaaatggattatgactctctcggcatgactcatggattgttgtttactaaagcccattcgttgtaatctgaagcccatcgattcttccttgacttgggccgaaactgcaatttttgatgatgaagaagatctcgcttttcaggtctgaaactctgaaccaccaaaaccccagatcttgtcgtcactttcactcgcgattctctttgtgacgattatattttgccgaaagtttagatgcatccagtttttgcgtcacgtcaaactagtttctggaactcaaagtaatcttcctccataattagcccgcgatcgtgaaaaattgatcaaacacgagagacctctttcgacatgacgttggtacagtacggcaatgtatatgggtcataaatttcacggtcacgatagatcagcgatcctttttgtaaaacagtcgcagagaaagagaataatttttttagggtttagaagaaggagttatgatttcttaaggaaggaaggaaaagatgaatatttatgacgagagaggttcacgcaacaaaaaggaaacatcagattgttgttttccttttttcatgtttggacttataagaaaaaaggaaattaatcaagtttacaacggtcttatttttctaactgcaaaagagtacgtgttagaattttattatacaacggtctatttttcacgcgcctacgcgcatcatccttgccgtatcttctctcgaagcttcccatccaaattcagcttcttccgctgccagttccactttgatgaaaaataaaagcccaggcccaataaccccaaattcttttttaatttgatttaatattttttcttcgtaggcatagtggcccatatttaacctcacaatagaggatacaccaggatcgaagcctggcttgataagataatggcaacaacaatgaaccaccactcgcccaattgttccttcttaacgtgtaaagtttgttgttcccataagtaaaaatattcatatataactaaatattcaattttatattttgagctaaaaaaataattttattatttagcaatttattgtttttttttatcatattatatttacttattaatgtggacaactaattaaattatagagcgaccgacaattgtgacagtgacactggagttggactcggctcaatttaaaggggtagttcagtaatcatacctcacattactacactcttgattaatatataaaaccaaatcagtttttaaaaataagggaaaatcctaataaaggagaagaaaaacagatctgaaatcccgcttgatactccaccgactttaaactactggtttttgtttgatttaagtatagtgttaatgactcctctctccaccttcctttgattctacctatcacttcccttgccgttgctccatcttcatcactagtcactatacaccaatcttagatccgggaagctaatttctcttctccgatcggtgaatgcagttacattgacctcggatctaaccaagctcttctggtttccagctctctggaattcaaaaaaatggaggagaaatccaagtcaagaggttggtgcggttggttcatcgccattattgtgctagcttctgttatcctcgccgtcgtttacactgttaaattgagaacgaagaaatccggtgacgatgacggtggcggtcccgttcctggacctcccggcgccattgataagaaatacgccgacgctcttaagctcgctttgcagttcttcgatatccagaaatgtaatcattcctaaatctttctaatcgtgtctccacgatctccaattcgaattccaaattcatcatatctcccgctaagtttcaaatctagtctctactgattaattgtgattttgatttctatgtagctggtaaattggagaacaataagataccttggagaggagattcaggtcttaaagatggaagtgaagataatctggatctttccaaaggcttatatgatgctggagatcatataaagtttggttttccaatggctttcactgctacagttttgtcatggtcgattcttgagtatggtgatcaaatgaatgcagtgaaccaattggatcctgctaaagactctctccggtggatcactgactatcttatcaaagctcatccttctgacaatgtcctctatatccaggtttggacttcgaatcattcatgttactaagattagcaatgattctcacttggttattgttgttaggtgggagatccaaaagtagatcatccatgctgggagagaccagaggatatgaaagagaagagaccacttactaaaattgatgtagatactccagggacagaggttgctgctgaaactgctgcagctatggcttcagcgtctttggtgtttaaggatagtgatcctacatattcagcaacgcttctgaaacatgcgaagcagttgtttaattttgcagatacaaagagaggctcttacagtgttaacatacctgaggttcagaagttttacaattcgactggatatggtgatgagctactatgggcagctagttggttgtatcatgcaacagaggataaaacttaccttgattatgtgtctaatcatggaaaagaatttgctagttttggaaatcctacttggtttagttgggacaacaagcttgcaggaacacaggttagcttggaagaaaaagtaacctttgaaaattttgtgttttgaatttttgctcggataacatttatgcttcttaatcattacaggtactattatcaagattactcttctttaagaaagatttatcaggaagcaagggacttggaaattacaggaacacagctaaagctgtcatgtgtggacttctaccaaagtctccaacatctacagctagtagaacaaacggtaatctcaccttattattgtatagaagataaagcctctcttgacttaatttccttataaagcttggatcttgttcaataggtggtcttatatgggttagtgaatggaactcgatgcaacaatccgtttcgtcagcgtttttagcctcgcttttcagtgattacatgctcacttcccgtatccataaaatatcttgcgacgggaaaatcttcaaagcaacagagcttagagatttcgccaaatcgcaggtaacaagaacaaaacatgaaagtctatagataacgaaatagtcaaagaagaagactcactagagtttcttcatgcaggctgattacatgctggggaagaatccgttgggaacgagcttcgtggtgggttatggagacaaatacccacaatttgtgcatcatagaggagcttcgatcccggcagatgcaacaacgggttgcttagatggattcaaatggtttaactcgacgaaaccaaacccaaacatagcatatggtgcactcgtaggtggacctttcttcaatgagacgttcactgactcacgagagaacccaatgcagaacgagccaaccacttacaacaatgcactcctcgttggtctcttgtctagtcttgtcactacatcttctactttacagtcgttgaagtgagctttgcgtgttttagccttcttattgaaaatcacattgcttcatttttatttgtaattttttaaaaaaaatcgtgggtgtgtgtgtattcacgttgtgtattgcttgatatgttgatgcgtgtaaccaaacaattagttgctctacgaatccaaaattgaggaaaaaaatagactaatcaaataaaaaaagggtacaaagtacaccatagccataggtaacaaattgatgcaacggtatgaatgcaggaccggttagattctaaaaaccaaactgttctaaaaaaccggaaaatgtcggtaaaattaacgaaccgggttattgggtttagaacttaaaccctttgtcgcgtgaagaaaccctagtctccttacaacgaaggcatcttcttcatcaattgatctactctgctctgctcaagatcagaaatcgtcggtttagttctccggttaaaagtttcgtctctgcgggtgagatttttctctatgttattctctgcttgagacttcaaattctgtgtttagattcgatttcattgagctcaacgttttaaagagtccagttttgagttgcgttactgttcttatttgagactgtttaattcgaaaaccctaagctcattctcaaaagataaaacttgccgctatatagtttctcagaagtgaagctttttttttatatatatttatgaacaggaattggaacttcaatggagggattaaagctctcagaagcggaattgatgatttttattcatccttcccagagcagaaacgtttttcaaggaatttgtcgcgagctcagttctcttctattccagttcgttctttttcttcctcctatttacttcttctttggtttcaagttttgatttttaggttgtgtttcttaaccttataggagaatcgaattgagctttcttgatgcaatgtttgttggtgataattcggtttttcttataatatattgtgtgtatcaatctttgttgtgaaggtataatgaaacctttgatggagttctattggcttatgatgctactgtgaaaagcaaacaagctaaaatccttacaggacttcatccttactttggcgtcagagttaacactagactactcttatttgatcctaagcccaagagttttgtaggttagaagatctctattaaactttgtattgatctctgctactttttagtttcttgtgagtgagcctttatgtgtttatggttggtgattttctcttctttgtttttatgcagaagggaaaattgtgaagatttctccagagtcaatccatgttattgttcttggtttctctgctgctgtcattacagacgttgatatccgggaagagttcaaatacagagtggtatgtatgactgataggtcttgaatgttactttattcctttcttccgactttgttaaaacagactataacgttttctctctattcagagagatggtgaaggttctttcgtgagcagatcgcataaacggcatgcactaaagcttggaactatgttgcgccttcaagtccaaaggttaaacttttagcttctctgctctactgtttttttcttgtcagatagatttctaggtaaatgaattgagattattcttgcagttttgatgaagaggttatgcatatagctggatctctacttccggaaaacacaggatgcgttaagtggctcgaaaagaagtctgaagaagctttgcctacggataggttagtttagtttgcacaatacctttaaactaactctctaatcatcatctttaataagaaaactcttcttgtatttacagggatcataaaaggaggaaactcgcctgaggaattttgaaattacaaaacagtagaagactcttgaaatgaagagaagcagctatgctgaaattttgttgtatcaaatccatttatgtaaacccttttttttcatcataatactaacattaatgtcctttaaaatctgaatgttctccttaatcaaaatcaaaaagttatgagtaagttatgaagccataataataatatccagctctgctgtcttcgtttttaaatccttttgcagagagtttaaagatcgaaccagtgaagaagcatatatgttatagtttaactgaataaaacaatagtttgaaaacaaggtacaatacaaagcatctgtatataaatgatacaccaaataaaaaatgtcgaaaagggtaggaaaactaatgtaacctatagtttctcccagctgctcttattcccattaagcttaagaccaagagcagcccaattctaatgatacaacaaacacttcataacaaacgtatgaaacaagttcaactacacctgatggttgatacggttaggagagattcagcagtagtaccatcctgctcaatatcgatgtctaggattcccgccttgatcatgatgatgatgacttcctcttcctcttcctctgcggtcatggtcaccaccttgttgatgatgatgctgaccattataccctcgtgggttattttgctcggacccaccttgaccatgccattgttgttgttgatgttgattctgatgattaccagaatacccccctcctctagaggcatgttgaccttcccgtgattgactctggtaaggctctgatgggaatctcccactaggtccacgaggttggtacccacctcggttttggtaaggagctggctgagcatagccttgtgcaccaggtggagccatatagccaccatgttggtaaggaattggtggaacatactgcggaggattgtagccataaccaggagccgggacatctgttggtgtctgatatcggtctgttcccatctgtaagctgttggaaacaagacgatgtgctgcgtttcccagatgccttccagatacacttccaggtgggttttgcctaaagaaatgaggagaaagaaaaaatgaaaatttgatatacaacattaatgatatgagccaaagcctttgacgtgtttatagtaacaggtgcatgcctctagaggaggcgtattatggtaattaattaattaattaaaacgtcctaaccagtgacctaatcaacctaaccatagtctcgtatcaattagcaattcaaacactcgtttttccttggtttgatgattttattacctcccctgattattatgcatcccatgattattatgcatcccgtgattattatgcatcggtctccttccattgtcttcatgccacagagcaggtgggggtttcaagtcccctatgtccacagtctgaacagacaagagaaaacaaccaacttaagctaccaagacgaattatccatagaggtcactcagaataagttcttcttgagcaatgactagctaaaccattaaaattccatagaggtgaccagtcacagacaagacaaagtggtgtcacttaccttcttagggaagatgacaccgggaggaggcctggttatgtgttcatgtgcatctggaagtctgtaaatacaacatctgagaagcaatgaaaataaatcagtcatgcatgtttaatcaactttggcttcaaacatttttgaaaacaagggttcgtgatctcacatgacttggttggtcaagatgtcctccataccctccattggggacctgaatactggcgggtgagtttcccctgaacacggagtcaagtagccattcataccatcactgcaagtagttataagaacatcaggaaacagttttgtatttgttggcctcagtgagatatccaactgaccaagctatttcttactcattcaccacaaaatcataaaacaaacaaataggattgcgttttacaaacctgagcttaggtttgatcttaaccttaaagtctactctctccctggcacttaactgccgacagtgattgtcaagtgaaaagacgagttcagctagacgatgagacgttgctatgaaaagcatatcacacatcctgctgtttctacgcttctcttcatcctgaagattgaataaagaacgcttaaaaatccatctttttggaagcacacatcttgatgtgaaggaaatcataatagatgaaggaatgacgtatagggtagcataccgtcaatgtaaattccacttcagaaacagcttctagtaggcgcctttcatcaatgaaaggcagcttagcaataccctttgatgtaaaaagtaaaatgtgttcaaaatatagtgattgtgtttctaatacataaggaagcgatcaagaaagacagagaggctacctgccaggaaaaacgcttcccattcatgtcgacttcaaaatctagaaaaaccacaatcgaaagcaatgtagatataatttgttacaacaataacactcagaaaaagatggaatctttactaggaaaggaaacactaccagttgggtaaaaatcaatgataggagagttgggatctgtcatcaaggtcctgtagcgctctggaagtgcatgcgaactgaccaaatgcagtaaagatcagagatataccatagagagtaaacaaaaatgtcgagaaaataatgaaaaatcatagatgtaactaccttgcagctgggaacaccccaagaagttgattgaaaggcttaaaaggagttcctaattcgaacttaatatccatctctcccaaatccttcagatcagaagcgaatggtgcatagtggtaaggatagaacctgtaacataagagtacaattatatcaggagagacagctaaaacctctcacagtcaatgaatacctacgaattctaaaaagcaaatatagtgtctaatacaaaggtatatatataacagagcaaaccctatcagaccaagaataaatataaaaatttagatggaaaataactatcaaggcaaaaaaattctaatcttaaattactcctgcgttttgtttaaaaggaaagcagatagaaaacaaaagacaactcaacaagaaattttctatggcacttcaaatgaaaagcttaaacttaaaataatagaccacactaaagaaagtaatccaaacggaacagtaagtgaagttgttctggacataagaaatattaagtgaaggaactcaccactgccaggagcaaacaccttccatgtagtaatgcatgacccaacaaaggccttctgtgtacttcaaaacctgtacaaagaatatttcacaaattagaaagaaccctccaagagttgtaccaaaaattgaattaaatatcattctcaaacttacaacatccttccggactctttccatttcttcaggggttactactgagaacttctcttcataataacgttctctccatccaggttgccctagcttcacctatgcaaatggaaaccactttcagaaatgaagggaggcccaaagattgaccataactgaaaaccaaagatattcccaataacgtaaattcactaaaaagaaccttatcctcttcagtagtatctgagttgaacgcatctgatttctcacggattaactccttgagctttgtctttagctcttctttgttctcgcgttcctgaaataagtaaattaattaaaatgactgtttgtttctgtaaggtcacccactctcaattacacagtgacaaaggagttaaaatcacataatgcctttccaggacaggaatacatacatcagactcgagactgttctcaacatcaacaatagcagcaccaacactggatcctggagataaacgtcgaactttttgatgtggagcagaccttccatcattggactgaaatggtgaaggtgtaggagccgaagcaagtcgagaaccactaaatcgtgcaaccggaacaagatcgggttgaactgtcggagcttcatcatccattctttttgtcgctttacctgctttatctcgctttactctttccgcttgcctctgatataaaccagagtaaaaaggaccatcaatacatcattacagaaatatcagtactatccatatcttgtcgagatactaaaacaatgcggaaccatataaatctatttaaatggatcaagttacaacgtcaccaccaaagtgcagaggattctagcaagttttatctggtcaagtgtttccaaatgactctaatgtagcaataaatatacttgcattgtaaacaagattcacatacactctaccaaacgtgaggatacacatggtgaaatattaatatctcttccagctctactactcaaaaattataaacttaagataggttacaaccgagtgggaaaagggaaatgtcgtgccagtcaaatataatcagatacattaataaatagctactcaggtaatgtgtgcctcacttcaaggccaaaataatgtacgttttctaacaaatacctgatgttgcatggctcttttctgaaatatcttatcttcaaacgatccaacagcctgaataaactgttccaccctctttaaatttggctggagaggaaaatagtaaaagataaagtcaaaaccatgtcacctaagggtaaattgaataaaccaatatgaacagagaacaagtaccttgcacccatcagttaagtagccgtcaaaagaccgaaattccttcttgtaaacagccataagcaagttgatagcaccctgaagaaatgaagaattacagcaacgtttcatcaaaaaaattacaatgcgttgtaagatatctcaagtttttaacataggatagataacggaattgacatatgccttagacaatagacatttaactgataccaccaatactaacgtatctaatcatactagggtatcccttgaaggttctctaaacgaacaattcataatgaaatccaaattcaggaacacaaacctctcgaatctctaatgtgggcatatgtggtaagaagtcattgcccacaaagaaacatatgaagataaaatcatcaacaatgcgctctagatcaatctcaaatggtgggttgggaatcctcatctcaagctccaggtattctctaagaacccagatatgtagaaactgacaaaaagaaacaaagacatgagacttgacaataatatcacacttctaggctgtatctcaagaacctgctgatacgtgtgttatgaacttggttatgaatttcaacctgatatggctttttgacaaaatcatttccatcgcctttctcatcagattctcctgccctcttctttggttttccttcacaatttgaagcaaaatggcccatttgaccacacaagaagcacctctcctgctgtccaggagtgtagaccacctaaatcgtgggacgaaattcaggattcagcttagttattcatgaagaaaatagaaattgaagattttacactagttatctccattttttctacccacttttgttattctttcaaggaaatatatatatatatatataaaacctcaaaattgaatacaaaaaacatgcggaagagtaaataaagaacctctcgaagaattgaaaaatgaacttcatgggtcgccaagcccaacataatcaggtcagcatcctgtcaaagaaagcaggacaaaatgagcctcataagttaataacacactagaaaatgaaggccaaaaaattaacaagtgattaagacctcaggataatttttggtgcaagtacaaattgaaaaatgaagaatcataccagtccatacaagcaatgccgtgtgtttgggtcaaaaccaggaagatttctttgaagacgaatgtatgacatgattttatgctctccttcacctggaacatttgcgtctgaaaggatgacctttgcagttcaacagttaagtataaaattagtcacaaactcaatccaatacgttaaactgcataactgtatgaagtaagaactaatagggaatcacaaataccttgatatttttccaaccaacatcatgattaagtctaaggtgtacataatattgcagcgcaatagacagaacacccatgaattccgttccaggtgtaataacattagaatcaaacacttgagagtccactttaggagggagtcttctaccctccctctcaaactcctctcgtagcctttcttcttcagcagcctgtaagattaacaatgtcaacagatttccattgtaaaggtacgagactcattaacagaatgaaaaaaaaaaagaacacgtaaggaaacgaaatcaagaacacaacaaacattagaaggcatgtctagatgaaagtaaataggcaaataaagtttgtctggctgaggaaactacacagtagaaaccccaagccagtatggggtaaataagaacatactgcatccgatgcatctttagcagatctaaaccgtctagacctctgttgattcattttagctcttggagcaacaccatctaagacccaaatatataaaaagtattaagctttaagcatactattctaaaacttaatgttggctgataaagaatacttaccaatagccatatagagtaacttccttggccgtaccatcacgaaaagcctatcaatgtaatcaaacatacactgaaacacctcctcaaaggtagttggagatggctgcaacaacaaacatagtcgtcaagtaaagaaagagctaacagaaacattctacacgtgcatactcacacaaagatcaaatttttacaacaaagaaccaatttttaaataaggatgaaccaaatttgaaaaccctaatgtctcaaataaaacattcaacagtgaatgaatccaaaaatcgaaaggaaacgctaccctatcttcggggtgaaagcaaggatggataatcccgttcatgtcgagataaagattatcgtattcgaggttgttagggttaggtttactagtatccacaggaatcttgatgccttcgatttcaacaggctcttcctcgataacatccgccactaaaagaggatacttctcggccaaccatcggtaaaacgacggtacacccattcttcaccgatgtcgaagatatatatctccggcgacacaaaggaacaagaaagtaaaaaaccaacggtgtttgccgacggcggttaaggtcacgaagtgcacatttattgggttttttcctaatggatgagaaagcaaaaatcggattaatgaaacagtaatcgggcttaagacaaaccaaaatatgggctttgtcggaagcccatttatcaaaaaataaaataaaaagaaactccgttgccgggactcgaacccgggtctctcgggtgagagccgagtatcctgaccagctagactacaacggatttgtgttcgatttcttagctcaaattatatgacacttaacaagatttgaatcaaagaaaagagaacacgaaggacttgttgtacttgattaaactagtctctttcggctttatgtctagttcttgtggtccatctattccggcagaaattatgattcttggattaaaatatccttttgtttaatctttctttgtgagattagtggtataataagtctttgttatacatttttcttataatctatttgtctacattatccatatgtctcatagtgactaatagtactgtaaataaaacaattttgttataaaattataaattccccttttgctttgcatgaactatgggtgaaccaggaaccttaactaataaccaggaaccttaacatagaatgaaaaacattttgattagtggatttcgatttttagaaagagtaagctttgaatattgaaaatcataataattcataatctaaccatatatgagatgctatgaatatccttttagtgagaaatatgtacgatttggtagtttctgatttaccagccatgagagatgcagagttggtcgtaacatttgtcacaagattggtagctacgaacataatgcagatactgtcatacacgcacatgtatacttacatacacaaaaccatattgcatgtaagatattttctcatagtgttttgatgatatttacgttgcttggtgagacatgatcaatgaatttaatctacatcttgtagatataagcactaggtaaccattttttaataatcaaatacatctttatataatttacttttggggaacaacaaaaattcacaccatcccaagagttccatatagtggaatccaaaacgatgtcgttacactctccctcctttacgctcctctcttatattatagacgaaacactaattcttctctgcaaataaaaatctttcctttctccactctaatggccgcaacggtcattttcttccttcacttcgccgcaatcttcttctccagattccaccacacctccgccatctcatcagagactcaagcactcacatctttcaaactctctctccacgaccctctaggagctctcgagtcctggaatcaatcatctccatcagctccatgcgactggcacggcgtttcttgcttctccggccgtgtccgtgagcttcgtcttcctcgtctccacctcaccggccacctcagtcctcgactcggtgagttgactcagctccgtaaactaagtcttcacaccaacgacataaacggcgccgttccttcgtctctctctcgttgtgtcttccttagagctctttatcttcactacaactccttctccggcgattttccaccggagatactgaatctacgaaacctccaggtcctcaacgctgctcacaactcactcaccggaaatctatccgacgtcacagtctcgaagagccttcgttacgtcgatttgtcttccaatgcaatatccggtaagattccggcgaatttctcagcggattcatctctccagctcatcaacctctcgttcaaccacttctccggtgagatcccggctacattgggacaactacaagacctcgagtatctctggctagactcaaaccaattacaaggcacaataccatccgcattagccaactgttcatcgcttatacacttcagcgtaaccggtaatcacctcaccggtttaattccggttactttaggcacgattcgaagcctgcaggtgatttcattatcggagaattcatttaccggtacagttccggttagtcttctatgtggttattcaggttacaattcctccatgcgaatcattcaattaggagttaataacttcacgggaatagctaagccgtcaaatgcagcttgcgtgaaccctaatttggagattctcgacattcacgagaatcgcattaatggcgattttcccgcgtggttgactgatttgacctctttagtggttttggatatttctggaaacggtttctccggtggtgttacggctaaagttgggaacttgatggcgcttcaggagctgagagtagctaacaattcacttgttggagaaattccgacgagtatccgtaattgcaaatcgttaagagtcgttgatttcgaaggaaacaagttctcgggtcagattccgggttttctaagtcagttacggagcctgacaacgatatctcttggaagaaacgggttctcgggtcggattccatcggatcttctcagcttgtacggactcgagacattgaatctcaatgaaaatcatctcaccggagcaataccgtcggagataacaaagctagctaatcttaccatccttaatctcagtttcaacagattctccggcgaagttccgtccaatgtgggtgatctgaaaagcttgagtgttctcaacataagtggatgcgggttaacgggtcggataccggttagcattagcggattaatgaagcttcaggttttggatataagtaaacagagaatctctggtcagttaccagtcgaactatttggtttaccggatcttcaagtggttgctcttggaaacaacttgctcggcggcgtcgtaccggaaggtttcagcagcttggttagtcttaagtacttaaatctcagttccaacttattctccggacatatcccaaagaactatggatttctcaagtcattacaagtgctttcgttgtctcacaatcgaatatccggtacaatcccgccggagattgggaattgttccagtcttgaggttcttgagcttggttctaatagtttaaagggtcacattccggtttacgtttccaagttgtctcttttgaagaagcttgatttgagtcacaacagtttaacagggagtattccggatcagatttctaaggattcttctctagaatctctcctgcttaattcgaattctctatcgggtcgaataccggaatctttatcaagattgacgaatctaaccgcgttggatctttcgtcgaacagattgaattccactataccatcaagtctctctcggcttcgtttcttgaactatttcaacttatcaagaaacagtttggaaggggagattccagaagctctagctgcgcgtttcactaacccgaccgtctttgtcaagaacccgggactctgcggtaaaccgcttggtatagaatgtccaaacgttcgaaggagaagaagaagaaagctaattctactagtgacactagcagtggctggagctttgttgctgttactctgttgttgtggttatgtgttcagtttatggaaatggcggaacaaactaagattgggcttgagtcgggacaagaaagggaccccctcacgtacatctagagcgagttctggtgggacaagaggagaagacaacaatggtggacctaaacttgtgatgttcaacaacaagatcacgttagctgaaaccttagaagccacaagacaatttgacgaagagaacgtattgagcagaggaaggtatgggttggtcttcaaggcgacgtttagagatgggatggttctatcggttcgtagactaatggatggtgcttcgataaccgatgcaacgttccgtaaccaagctgaggctttaggtagagtgaagcacaagaacatcacggtcttgagaggttattactgcggaccacctgatctaagacttcttgtttacgactacatgcccaacggaaacctcgctacgcttttgcaagaagcctctcaccaagacggacatgtcttgaactggccaatgcgtcatctcattgctcttggaatcgctagaggactgtccttcttgcattctttatcaatcattcacggcgatcttaaaccgcaaaacgtactcttcgacgctgactttgaagcgcatttgtcagaattcgggttagatagattgacagcgttgactccagctgaagaaccatccacttcatccactcccgtcgggtctttaggctacattgcaccggaagcgggtttaacgggtgaaacaagtaaagagagcgacgtgtacagcttcgggatcgtgttgttagagatcttaacggggaaaaaggcagtgatgtttacagaggatgaagatatagtgaaatgggtgaagagacagttacaaaaaggtcagatcgttgagttgcttgaaccgggtttgttggagcttgacccggaaagttcggagtgggaagagttcttgttagggatcaaagttgggttgttgtgtactggaggagacgtcgttgatcgtccgtctatggctgatgttgttttcatgctcgaagggtgtagagtcggtccggcgatttccttgtccgccgatcctacttcacctacttctcccgccgcaaccgccgtttcttgaaattgctgttttcttattacaatcattttatttctttttcctttattttttttcctttgtggataatttatgttgactttcattgtgttgtatcttgtcacgggtacgacaatcaaattttaagttgccaaatttattgaatttcccacggtggaatgaacaatcacttcaatgtgttgttgttaacttgttatcttgggttttagaacaattttttccgggattctcgttcaacaaaaaatcatattataacgaatatatatttgtcgggtccagcatattattattagtcatgtagactaaaatagtgtgttgacgttgaggtttagaccctatggcgccgttatggtaagcattgcgtaaactatctaccgagctttagtagacaatgttccgtgatttggtcagtggggttaatacttaatagtacatgtgtggggttttcaacattgtcgttgttctgttttagttcccgccaaatacgttaggacaagtgggtgtgtgacacgtgttggtcttcatagggagatgaaagtagccgttgatattatttattggatttttgtgtttggggaaaagtgaagttaagccgtcagaggacgaaaagcttttttaagcagagcctgttgttgtctgaaaccccagtccacgttggatttcttactgtttagccagtgtactttgtttctttggccttttttattaattattacttctctttcatttatttaacttttaatgtttggttggtggtgcatattaatggagaactccgcctatattattctttggattccttttataaactccaagtccaaagaatacatttcttgaactataaacctttttacgtatattaaaatgaagcctaaccataatgacaacatttatttttccatgaaatagtggaaatacgttggtcatgaagataattaaaacaagaagaagggattggtgtaatcaagaagggaaagagaataaatgcaaaaagaaatgcaaatttgtgtgagagtgtttaattgacgtttggtttggtgtggacgactcataccattattacatgtgtcatcactctcatctttataacaagtcacgacaatgttactgttcttgttttggtatatactcccttgaacccactaccactgtcattgttttctagtacaacaaagtgaatggtaagaaaattatttacagtgaaaaacgttagttccttaagtgcaatattcgtttactgaaaaagtgaaaataaatcgagttcattagttcatgggaatacctcaagtagcagagttttaaaatcccatactagtaagaagaagattgtatatagaaggctggttattagagactttagagttgtattgattagtacttaattgagggatttgtaatgcaaatgagaatgcttttggtaccgagtcatataatttcacccaagttacacaagtgtgtctaataataacagaactcaaactcacgaaaaagaactgaaaggagaagctacacatcacatgaaacttctcatatgagacatgatgataataacaataagtctccacttctttcactcagctctagactgaccagctcgagatgagaggatgataccaacaatgagaccatacagtgcaagcgcttccgcaaagatgagaatcagaatcattcccacaaacagcttcggttgttgcgcattcgctctgcaaaataagacattgagattaacaaaacagagttctgaatgatgctgtcacatatagttgatgtaaaagaaaacaaagcatcaggtgcaacgcctgttgaattctactggtaatttatcctaatctgcttcaaagattcaatccagacagttcttaaccaacaccaaatctaatatcaaacaacgttacgagagcaaatcaataaagagctctttctgggataagtttgataagaatgaagtagtgaaactgtatatttttatctttgaatcaggattacaatcaacaaccctaacaatcctctaggctatggctaaaagttcctcactaacaaagtaaccatatggtcaaagtctgtttctgtttctctctaatctctatttctagtctatcagatctgtgttagaaacaagtgttcacgatataacattcaaccaaagataaaaggtcatgactcatgacctctgtcaatcaaaactgcatttctaagaaccaaaaagttgcagatatcttcttccaatcagtttcaccatatgattcataaaagaagatcaaaagaactgcaattcctagttaatgtaaaccattgatcactaaatcaccgagaaagaatcgagattttgatgataaaaatcagacttcataactacatgttccctatccaatgatgtaaaacaacaaacaacaaagctatctcagaaacttctaaacaagtgaaaatcgatcaaaattgctgcaatcaaacagttaagatcatgtagcagagatagcaattacctaacaccagcatcaccgacgattccaatagccataccagcagagagaccagcaagaccacaagctagcccagaagagagatgagcatagccatcgaataggtaataagacttggccttggggttaatcccagtactgatgataacagcgatgatcaaaccataaatacctaacacaccagccatgacaacaggaacaatcgatttcataacaagttcaggtctcatcactcccatcgacgcaactccaactccactcttcgccgtcccgtacgctgctcccatacctgaaaacatcaaatcggattcgaatcgaatcaaaaacattgggtgattcaattcggggaaattgacaagagagggatctgaaatcttacaggagaaaacgagcgcagcggcggcgccgaggaatccgaagaaaggcgcagtttcatcgccgctgaaacctgaagaagccattggctctttgatgactgttgctccgatgagatctgttaccaaattgtagtatttgttaggagagattgtgagagggagatagatttttttttttttacgggagtaaaacaataataacggcggttaaaaatagtttttttaaaaaaatgctcaaacgtgtgggtgggttctctcagttttggtgatgctagattactttattgggcttagaggaaaggcccaaacatcagaagataaaacccaagtttgtggtttgctagcttataggttcatcttggttatgtcgcttattaaccactagttttggtgtgatgtatttaggaattattatgcagcgtgatagaatgtttatgtttctgttgaggaaagaatatgatggtaaatattactgcgaaaataagattgacgttgacaacctgaaacaatgaattaaaaaattataagaatgttaacgtacggttgatgcaatgagtgtaagcttgtaaagagttgatgcaatgaattttaacggtcaatcatcagattcataatatcgatgttcatgttacgtccataaaaaactgaggtatggccaaataataataagaaaattataaagcaaagaaatgagagtgaaacatatcctgtgtgttcatagtttcatgaatgaattatgtaattgtcaacggtggatcaatcattgaatttggtggatatctatatttgtacacatgtataaacgaatgcattccctcaaagatattatttggacagattgacaacacacatagctagattatctatataaatcatacgataacagaataaaaatgtaattgagaatagagtaaatcaaatctgcatcatatatatacagctcatatgaattagagaataaacaatagaaaacaaacatcttggtcgcttttgttttatatacgtttcgatgtattatgtatatgtacacatgcaaacataaactgtccagtgcagagattcttatttctttacagtttgtaatatgaggaaaaaaaaaacatatatatacttaattagagcagcttttggacatggttttagatttatatgcaaatggtcaaatgtattaaaacaattaattatatttttcgacgaaataattgatttattctgggatatattttggcgatcttgatcattataaaacttttctttgttgcttagaatatttatctggaaggacagttggaccaacgagacagaataaaaatcttctttctacatcaaatttatttataaacacgggtttatagtttgaaaaagtacacttttaaacacgcccaacgcatttgtttgtcatatttgttattcgtgtcatgtatagaacttgtataaaccttgtatttacgattcactggatttttgtggtgacggtggagtacttaaaaagtaaatatcaaaagaaattacacgtatgagataatcagaacattgacttgcttaattacaattatggttatcaatttatcattataatgtttgatgttgacaaagcatcatttcacgaacaaaatgactaaacaatcagcagaattattcaaccgctcgcgtataatgttaatattcaatcatagaaattgttccttcgacgacaattaacatttaatattagtacatttcaggtcggttccacgtcttcataatgctaattaatcctaaccgagaaaagttctcagtattgaccgtagttatttaacttgagatatatcactgtttactaagcttaagttttaattatttgcataatcaattcatatacaggatttaaaattaagggtttattagaaaagtagacactttttcaaacataatttacaaactaggtagtttttttttaaattagagaaataaacactttttttactttttgtgagatagaggatttgtgtaataaactacaagacaaaatatatatcaaatactaaaatgcctttatattaagagataagagaaaaaatatatgggaccacttttctttaaaacatttcctctttatttttatttttattttattttttttaaatatacttttaaaaataacttttttttttaatattataatgacttttatatttatatatcatcaatctcatgtattcgtacaccagtattttaaacatagttttgtacactaacatttgtacaccagattatcatatacaaaaaaattattataatatctcataaatcattaaatacatcgatttgtctcatatttataaattgaagtaattattgttcataagattaatacaaacatgatagtaatgtaaactataggtaatactaaatatgattgtgtacaccatcatgtacaccattaaattgaaatatgatgatacataccattaaatttgaagtaatatttatacatttctacgtagtgtacactaatgtttgtacacttctttatataccaaattcgtacactattttataaacatcgttttggacattatcacttgacaaaaattgttctctctttatgtatgtggtgtacaaaataggaaggtgtacaatattgtagacggcgcacgaggcggtgtatggtgtgacctattatctagtcgttttatgtatacctatatacactatattttacacatctttgtacaccatcatattaggtagttgtacacaactatatattttcgtttgtacggtgacgtacactatcatatatggtatatcacttctcacattaatattatacattacttcttacattatcgtcgtacactactatttgtacaccattttttacactatcgtgtacaccgtcggattgagattaaaaaaaaagtgttacgtattttcgaaatataactaaatttagactttttagactcacataaaagttttaaagattaatttgattatgtggtaatttttttatgaaaaattactatcaaataaagtaaaaatattgaagtaaaaagaagaaagataaaaagtaggttatgacaagatttttttctttatcttgttacataacaaaacaataaaaggttatataagttatttactaaaatctctattagacaaagaattgtattatagacaaaagagaaaagtgtctatttcacctatttttaaaaaaactacctagtttacaaattatttttgaaaaaagtgtctagtttgccacttatctctaaaactaatccggtggataaactaattaagattaaggtgatgtgaatatacatgaaatgaccttagtaaaatattcctttcgcctttgatatatttgccatgtgcggaatctttattggcttcatagttacacaaatgttgcatggaatttaaattagagaagaaaccttttgataacgttggggatatcccaatcgtgccaacccaactattccaattttacatttacatgtctaaaactaaaaggttcagcaagaaaaattattttcgatgcaaaaataaacaggtttagctttaaaagtatcaaacatataataaaaaagtttatataaaaacatacaatatagtgtgaggcaagcattgtgcttttatttaagttaattttcattttttcttacgtgttttatagtattaattaccaatggaagatttgaccaaggaagttagaaagggggaaattttacccagatttttattgttagtcaacttgaattaattaactttccagttttgaactattggaaattataatatcagctttgacgcagaattaaaggaaatacgtgtgtgacttattaaaacaaaacaaaaatgggaccatctttttggtgttgttgttcatattagctcattttatgtaagtaaacttaatgagacttccatgactataagtaataaaaataaaaataaaaattagcatgatgatttaggaataatatctagaggttataattagcatacctttacattaataatttattttttttccaaaccttgtataaattagagctcatagacagctacacaaacaagaagaaaaatagtatatataaataaataaaaatcaatacgtgacataactcaaaattccaaccaacaatttttttttttaaatggctgcaaaagccacaacccaaatcgtctccgacgtcaatcatctccgatacttcgctgtcttctttctcctctcgtgccacgtggcatccggcgacgaaggaacatgggagcttctcttaccaaacgtcggaatctcagcaatgcactctcagctcctccacaacgaccgtgtcataatgtacgaccgaaccaacttcggtccttccaacatctctctccctaacggagcctgccgcagtagcccaggtgacgcggtctcgaaaaccgactgcaccgctcactcggtcgaatacgacgtagctttgaaccgtatccgtcccttaacggtccaatccaacacttggtgctcctcaggaggagtcactcccgacggaactcttctacaaacaggaggtgatttagacggagaacgtaaagttagacttatggatccttgcgacgacaattcttgtgactggatagaagtcgataacggactcgctgcaagaagatggtacgctacgaaccatatcctccccgacggtcgtcagatcataatcggtggtcgaggtcaattcaattacgagtttttccccaaaacaaacgctccaaatttctacagtatcccgtttttgtccgaaaccaatgatcctggagacgaaaacaatctttaccctttcgttttcctcaacaccgatggtaacttgttcattttcgctaacaacagagcgatattgctcgattattccacaaacactgtcgtcagaacttatccggagatccctggaggtgatccaagaagctatccaagcactggctccgctgttcttttaccgatcaagaaccttgtgttagaggttcttgtgtgcggaggtgcaccgaaaggatcgtacaacctctcttggagaaacacttttgtcaaggctcttgacacgtgtgcgagaatcaatatcaacgacgtgaatcctcaatggatcgttgaaaagatgccgagagcgagagttatgggagacatgatgcttttacctgacggaaatgttctgttaattaacggtggttcttcagggacagctgcttgggagcttggtcgtgaaccggttttacatcctgatctttaccatcccgataaaccggtcggttcaagatttgaagttcaaaacccaagcactatccctcgaatgtaccattctatcgcgactttgcttcgtgacgggagaattctcgttggaggaagcaaccctcacgcgttttacaatttcaccggcgtgcttttcccgacggagctgagattagaagctttttcgccgtcgtatttggacactaagtactcgagtcttcgtccgagtattgtggatcctaggccacagacaacggtaaactacggtagagtcttgaggcttaggtttattgtgagcggaagagtgaaaagtccggttaaagttacgatgttatttccttcgtttactacacattctttctcgatgcatcaaaggcttttggttcttgatcatgtcatttcttttaaactcgggattagcaagatttatgaagttagagttaggactccaagctctgcgattcttgcaccacccggttattacatggttttcgttgtaaaccaagatatacccagtgaaggtctttgggtacgtttacagtgaaagtgattcatcaacattggtcattcacttactatatgtgttaattggttttttttttttttaaacataaatattgttgaagactttttttataaattgatttcgtagaattgtatgttagtattcaattattataaggaatcagatactttggtatttctccgagtcggtgaaattcatattatttagatactttaaagagatacgaaatctcgaatttgtttattacgcgaggacgtgggcaagagaatgatgctaaactgatttattccttgcggatttttgtggaaataaagaagaatatatatgtgaatttttaagttggaaaatccaaaaaaggaacgtcgtgtctctaaagatttgtgagactaggataagagagacgacagattctaaaagacatcaactacgtagtgagttacatcatatgatccaacgaagattcttactgtcttgcacgtctctcgacttgtgtcactctcttgcgtaactatttctacgcaatttacacccaatcacaaaacattccaccacttacattttttagaaaaattcatatcgggtccaactaagtttcttacaccaattttcattgttgtatatgagagggaaaacaacaatccaaataatggacctaagattcaaagagatttggttacattcttattagtactatgtaagtgtaaagtaagagaagaaatttacaaatgtaaagttcgaatctttgtgcttttaattatagttattagttagttattgtggacactttaaatgacatgagtttccggtttttcacagcttttgagaattggtattgatttcggtttctagttaaataagtatagaaacaaagcaaaaattctagacgatcaatcacaagattaatcctctgttacgaattaagaaatcctagttggtgattctaaagacatcaaatcttaatacctaaatcaatagagcaacaaaatcgttgttgaaacagtgagttaaaaaaaatctggattttgattttccttggcaattaagaaacacattcaaatacaatgatcatcacaccatcaattctagcctgagagttcggttactcggttaggtttaatccagttcactaacattcggttagtttggttaaatcgattttatatctggatatatttaatcgaaaaagatattgggccagcaacatttttatacaaaactgggtcatttttttgtttgaaaaaacaaaactggaccacagtttatattcgagatataaactcatataattaatcgaaaaagatattgggccagccattttttttacagcccaaacacataattgggccgccgttttttgaaaacaaacaaaactcggcataacgtatctccttcattcaaaacagaggaaatcgaacagaacagagaaacgtgtttgagacagagacgacggcggcgcagggcttatcggtttggaatattatcgcagggcttatcaattcgatacacagaacaagagagtaatgaaggtttaataccatcaataaccgaatcatctctcaaagagagtttaacataatgtatttttgttaaaagtaaacaaaagcaagacaaagcagaaacaatccaaaaaccctaatagaataatagttcatgattctaagcacgctctccacgaatccttcttgccaattgaacatctttaggcattatcgtaaccctctttgcatgaatggcacacagatttgtgtcttcaaacaaacccaccaaatatgcctccgcagcttcttgaagagctaacaccgcatggctctggaatctcagatccgtctacattacaattataatcaagatcaattttcttcatcaatttaggaagcactaatgcatcatctagggcttcgatgattgaaaaaaaaaaacaattaccttgaaatcttgggcgatttcacgaacaagacgttgaaaaggaagtttacggatcaacaactctgtgctcttctggtatttacgaatctcactgattcataaatcaaacaagaaccaccgatttcatcagaaacaaagattgtgatttgaaaaaggagaggtcgcgaaacttaccgaagagcgacggttccgggacggtaacggtgaggtttcttgactccaccggtagttggcgcagatttcctcgccgcctatgttaggattacacagtcaatcaatggctttctcgatgcatcaaaggctttggttcttgatcatgtcttgtcttttaggattgggtttagcacccccggttcttacatggtttttggtaaaccaatatatactgagtgaaggtgtttgagttaatacaatcaaagagttacaatttctcaaataacacaagtaagcaaaaaatataaatattgtgcaaactaatgaaaaataggaaaacaaatttaactaaacatggtaaaaaatagaaaatatattttttaattttttaaatatcaatatataattttcattttaaaatatatgtttttgaaattatatattatactattatatgaaataaaacaatattaatttaatattttgtattcatattaagtaatatcaagtaaaattactattaatatataatttaaacttatacataatggagctttatatagataattttattttatactttataaaaataaaataaaatataacaatatatactctactttaatttaatattctatgagataattgatttatcaaaaaaaattgaaacaatcaaaaaatgacaagatccatgttttgatgagagagagggtatctcaattgagaaacaattctaagataattacactaaaaattattatattgatttaattttaattttgatgatttaattttaataggtttttggtttacattcggttagttcggttaaattggttttatattctacatataattaatcgggacaaaaagaaataacttggccagccactttgtagtattgtatacaagcccaaagacaaaactgggacactttttgttctgttttttttttttaaacgagccacttttctttgaccaaaaacaaaactgtgccactttttaaaaatgaaaaacgaaactgggccaacttaaacccaattctgacatgtatacacatgtacgtgtatcttcttctttacggaacacccattttcaaaacagaggaaatcgacagatcggagaagcgtggttgagagttgagacagtgacgatggcggttaaccgatcttgatttataaagctatccaccggttcagctctcttaactgaagaagacagaccaaagaccgataatcacggttcggttcaaaatattatcgcatgggcgaagcaattcaatatagagaacaagaacagtgaaggtttaatatcatcggtaaccaaataatatctcaaagagattttaacataaatgtatttttgttgcagaaattatccaaaacacaaaaaccctaatagaataatagttgatgatttaattcgaatctaagcacgctctccacgaatccttcttgccaattgaacatctttaggcatgatcgtaaccctcttggcatgaatggcacacagatttgtatcttcaaacaaaccaaccaaatatgcttcagcagcttcttgaagagctaacaccgcatggctctggaatctcagatccgtctacatcaccaaaaacgaaacaattataatcaagaccaatcttcttcatcaatctaggaataactaatcaatttcttacgataactgacagacaaaaattgtaccttgtaatcttgagcgatttcacgaacaagacgttgaaaaggaagtttacggatcaacaactctgtgctcttctggtatttacgaatctcactgattcatcaaacaggaaccaactgatttcatcatcatcgaagacggaatgatttcagaaacagagattgtgattttgaaagaggagaaatcgtgaaacttaccgaagagcgacggttccgggacggtaacggtgaggtttcttgactcctccagtagtcggcgcagatttcctcgccgcctatgttacgattacacaatcaatcaatctgaaaccctagatttctcaaaactacgttacaaattcaaaactaagaacgaacgaacgaaccttggtagcgagcagagtcctcggagcttttcctccgtgtgattttcttgcagtttgcttcgtacgagccattgcttcgtcaagaacttgagagcttagaaactatgaagaagattgaatcagagagaagaagaatcgctaatagcttttgaatgttgttgttttgattttgagaaaagtgaagcagattagtgaatttatagtgatgaggtgaattattaggtcggttaattttgggagattaacgggagagtagtttatagacgtccgattaaaggccatttcgacggtccatatttgattaaggataagattagcatacgtggcgatctgcgttttcgattattattggtccaaatcttgtgtgttttaaggttagtgttttcttatggtttaagtaatggttttaaaatgagtagacttatattcgggcctctattgatcatgaatggactctacagtccagttaaaacaggcccagaagcccattgtagcagccacatcataaaaacacatatgcaagttcttcccaagaattcaagaaacataaatcttagaaacgtagagaaagcaaacatatatcgtgatgcagacatatttgatatgatatcatataaaacaaatataaggacactcaagatcttctcatgatcatgatcatgagattgtttaggtattttaaaatgtggttaagttttattctaagcatagtatggagtattggttagagttgctatattttaaacagaatatgattgtatttgatatttgatgtaactataagtcctacttcccaataacgtttcttgatagtgacgaccctatcattgacatataaaggtttcgctttggtaagtttagttcaattgttcatataaaggtctaaacctcaatggtgcacaatcacaattttatgtttagtgattctgctaatgaccaacataaaagctactagctataccatttcttgattgttacgtttaattccaaatgatattttctaagtattcggccattatattccacaactacccgtaattacagttagatccttcatctttactatgccttacagtgtttctacttgcattcatgtcatgtgcctaactgccccaatagccaagaattaatgtataatcatcattaccaatctcttggttatgatttaaaaacaatgattgcgttatacgactccaaactaacgtgtaccatactatcacatctctaagactttgacttaatgaatctctctttgaaattgtttgaacttctctagcttaattgcgagaaaaatgatagaagatgttattatattttgtttttcttttcactggtccactggtcctagaggagtcatatatttctcaataatattattggatgatcatatattctctgcgaatgcagatgctctcaatccaatgattagtactgctgtttatatcaagtggttcaaaaaactcacagccatatacgtccataccggagtattactattttttattatttaaaatgtaatgttattattaaaatgatttgacaatgaaggttatggtgattggtgaatatagtataaggatcaacgactacttgtgtgattcatgtgatatattggcggtgtcattgaaatccacagtcccaatcatatgagattatgagatacattcatacatatttcgtccacaacaacgattcgataactttctgaccccaatcatataacaataagaataaagaaatattagttcacatctagttaattcgagcaattttgcagttgatgatttgaagctgaaaatatgactaaatgcatggctttttatgggcactctcttactgtacgggtttctcgaaattcatcagtatctttacccctttttgataataatagctttcaattttacctatacacttctaaataaaagttgcgagtgttgtggcgctgacatgttactcaataatttatacgaaaaaggaggatattaagttaattaaagggtaataagagacttaattattagtggataataaaaggtattgtttcaaataaagctccaaattacttttagcaaacatttttggatgagctggtcgatggactggcttaacattgacgtacttgtatactcaatgtaaggactaaggactaatcatttcccaatataaattgatgctaattattacatgattacttttgtgtcgttaactaatcaaggtccattttcgttattaaaaataaattaaaaaaatattgtaacacgtactataaaattcttaatgcttgaagtccgaaattaggactaaagttattcgccctcatacgtcactgcgtacttgttcattcgctccataacaaatatcatttctaccaaaacccgttttatatgattaattttcatcctataattgcaatgcaaggctgtgtcctttgcttctcttttaacttaaattatcttatagctttttgcctcttttgttttcattctactacaacccatgaggtaaccaaatctagtgttacacaaacttatttaatcatcataaataattatgatatcttttgacaaaaccttcttgattttattattagtaacaagttgaacgaccatttccagtattggcatatatttattataaagatcccattagaatatacataattttttctgaccatggttagttttacgaattataatgagatttgaaagtttcaccaaattggatttgagtctgatgctgtggatgggttttaaaaagttgtgcctaacacttatgttatcaatagatgaaacatgatctaaacaataccaaaaaagtgaaaaaatatatttctaatttatatatattcacaacacaatagacatatacataatgaaataattacgtagatctaaacagtttcatatctccattagcgagtttgtattagagttttcactgattgtacaaatttatgttgtcggagccatgaacagaaacaaaacatttatatgaatatatatttaaaatacgaggggagatagagacgtggcgaaatctgataaggagttagagatgccgaaagacgtttgcctaaacaaatccaaagtataatcctgattagcatatcttaatgcttttgttaacctaaacattgcatgtgcatttctatgtcttcactcttcttcaaacttaaaataaagcactgatatataaaacttaaaaattatttaactcgacataaaaatgaaagctaaatctatgaagcaaataaataaaaactaaagattccaaataggcttttataaagtacaatagctaactattaaccgaacttatgtttttgtgttttactcgtcatgatatgataaaattttgttataaacagtttttaaaaaaaaagtgtacatgtgagtggagaatgacaaatttcactcgtaaaaagctacattttacttaattttaagaaacattgaggaaacaaaactttaatcaggttcatcccttctgcttgtagctaatcactgcctaatacgtaacattcactgtgtacaacggagcgccgtcacttatttgtttccttctttttctggtaacacctaaacctttggactgagaaagagggtcacaagtcggtcaacgcgatttttaatttgtttgaccactcttactgaattagctggcacgccacgtcatcttctgacgctgacatgtcagcgttaaacacacgtccacatcgacgttattcagcgcctagtagacgttttccactgaagctatcaaattaattatttacaacatttatttatttctaatcacaaaatatagaatttaacaacatttatttctatttataactgaaacatattgatgtacttaaaatttaacaataaaaacgtataatgatcgactaaggatttataaggatattgttgcttcaacaaatgacattatacaaagatttttatttgatgtgatttgtgtcctattgaaaacaaattaagcgattaatttattgtttgatcccatataatatactcatttcctcaatttgtgcgtgcatgttaatgcaatttggtgcatggaggcagaaagagacaatccactgccgattcatagcatacgatcgactctcttgtaattatatctttatggagaaaaattaaataattgagttcgattcattataaccaataataataaaaatttgcagaagcattaatgaagatttgcttaggaagataaaattaaatgagaagatccttaaaacgtaacaagtggggtgagaacgtaacgtcgcatgggggggatgcatccataacatgcatttggacccacctttgtttatttcaatttttttttttaatactatttattcaatatttagatttgaaatagggcaattcaatcatctatatcaaactataatttcagtatgaaacatatatgtatatatatatatatgagtattcgacttaaataatatgataagcgaatagtatatcataaggttattatcatgccacatgcggaaaatgtgatatgtaggagtgataggaactcaaggtgtggacagtggatcattgatcaacgattttttttttttttttgtagttcaacaatttttaggcgatgaaataaatttctcacagtacttaaataatctaattgcaatgcaataagggttatagtatacttacaaactatacaatgtaattaaaagaacataatctattagtagacataatctgaaaagtttaaggataagagtaatgagtatatcagattagaccgacagtaacaatgctgatactggttaatcatgcatttggtcacatgaaaatgtacgatacagagataattaaatgtacacatttatcatcagatttacctttttcgcaatataaaatagaaaattctgttggctgcttattgctaagaaatttttgataataataactggagatggggacattcgctcacatggaagcatggacgcatttgtaaactacaaaaataagcattttggtgcggtacgccgtattacattattttcgtttcttataaaaatacttgtttatgacaattaaattaatttcctcagtgagcaaaaagcatcttcagttattcttaactgggtctggtgagagaaactttagactatagttttatagtattaattgcatatacaattttaaattgcattgttaaattacaatttcttacaacttttcccagctacccatgtggtgggtttaatttattgttgtttaacataaattctcccacttccgtgcgccgaaattgatttatacgaaaacgacaaatttagtattaaaactgtattttatgtatatttaagtacaattgaaaaagttttgaccctcaagctgccgctgtggctaatggcccttgtttgtacgagcacgaactatctttgaagtatttatactaatttattgttaaagctctttaatccttttctaattttctttatccaagagcaatacaacctgttccgttttgttcggttaatgcgttaatttgttgtaaacttacgccatactcataacttcgaagacgcgcaaccctaatttctatgatgagccaccattttccaaatccttgttagctcgatttatctcatatcatattactaagatttgactcacaataacagaaatttcattattcgatagatcttgtcacacaagtcgttgtcgtttacaagtcaaatacaagttaagtaaacctaaccaaggatactcgatcacaaaaacgatcgtgtagatgatttttcttttcggtctaataactagtctaccttcgtcattccatagttttgaaaggtcatttttaagttgcaaactatagctattgatttaaaccaaggtcgcagataaatacatttctcaaaaacacagtaaatatgagatattcgaagcagatcgtctttactataatgattgatatagaaattaaaagtggcgtttaacagttatgtttttttgtttgctgttgaaatttttgatagatttcatatgctgtagatttatttatccatctatatatctaattttcaatcatatataggatattggatagactttccagcaacaaatatgctggctgaactgtgcctaaacttataatggtttacaccaaaaatttgaactccaagtccgcaaatgattttacaggggtttcatgtggtacatatgatcaacgatcaattgatcatctgatttggataattgaggacgtctctcttggataacaattatgtagtttgtatataagagttaactattaataagaaaataattcacttaatctataaagtcagtctttatatgtgtccacctgtgtagatatgaaccacttagctatgtgagatcaatacatagaatctcatcagattaattgcttttaagtttttaacatatgaacactatgactataaccaaacaagaacatgataaagagagaaagtgtctctaaatatgatcctaatcaaattccaaggtgatgttttgaagtcttttccaaagactggtcgtcttatccaacactagcacatgctcttatttccctaccatttcttttaaattcaaaagctacacttctttattcaaattaatagtaatcaatcctttatatattatctccaaacactatttttttttccatgatcgatagattcattagcataatcattatatatatgaaacataatcaaccactaattaatattcacatgtctaatccgtcatctcttgtatcaaacctttgtgcaccatccaatgtatatgaagaagaaacaaaacatactaaaatctctgatactcctcttaaggatcatattatttgtatccaacctctcttcaaacaaaactgattgattaatttccttaatatttaataatcaaccaattacactaatctttatttcattaaggaaaagaatagagccaaagtaaggaccacggaggtaatctcgtaaatatctcgaaaaccaatggcattgtgttattccttttactatataaacctcgtccctccctaactctcaaaatccccctgacattttctttctctcacaaagaaaaccaaatcactaaaccggaaaaaatggctggaggtctcgggaaatgcagcaagatccgtcacattgtgaggctaaggcaaatgcttcgacggtggcgcgatcaagcgaggatgtcttcttctttcagccgttgtgtaccgtcggatgtaccgtcaggacacgtggcggtctacgtaggaagcagttgtaggagatttgtggtgcgcgcgacgtatctgaaccatcctgtcctaaggaaccttcttgttcaagctgaggaagagtttggtttcgttaaccaaggtccgttggttatcccttgtgaagaatcggttttcgaggaatcgattcggtttatatcccggtctgattcgacccggtcaagacggtttacttgtcccgatgattttcagaagaattgccacgtggtgggaatcagaagcaagcttgatctatggatcgaatctcgaccgttacttcacggcgttactgaaaaagccgtttggtgatgtcacttgacggcgttcgtacgtatagagtaaatagacaataaaatgagagagccgattctgactcggtttgactcggaacgagtttacgagccgaaaatgttattggagacaattttgcggctgagtttgactcggattctttttttctctatttctttattggtgaggcggcgagttttattggtggtggctcggagatggccgtgaaaggtgggtgagtcattctaccgagtcgtcccgggttcgaatattcgttcaaggacgtagtatggaagtaaatgttattcaaattggttgtaaatttccattaaattggagaaatcattattgttggataaattataatattctaacaatcaacttgtatattccattgcattggtaattaacattaatcttgatttataaagggatggagcaaaagaaaataaaaattagagattataatatttaatctcattttgttaaatatttatgattgtcatatgttcgtacaattattctaaatttctaagactatttaaaactctttataaattgtggacatcaaattctttacaatagtaattaaatactgttttctagataacatgttgaattctctaatacatttaaatataaaaacgactgttattttttgagtttatattatttgttcgtaatttacctagagtttgtgtaattctatctcatgttaaatatttttagtttatagtatagcaacaacgcttaactaactacacatatactatagtttaaagttattttctaatcaattactgtgaatataaattttctcaactataatattttaatatttactccttttgtttcaattatttacttcttcggcgaaagtcgtttaaaattggaccgtagtgattggaaacaaaaagaaaagaggaacaaatccgaccaggtcatgtgaaggaaaagactatcagtaatagccactttgctctgttttcattctcaacaaagctttttctgtctttcacgttcttcaaacagtacaatttacggtacataatgtcatcatattaatatttttatctgttttggcgtaatttagttaaagaatgttcagacagccaaaatttttgccaactaaaatagtttagattttggtctggttcattctctgcccccactagtttatatggaagataatttgggtagatttatgtaaatattgatcgagttaaggggaacgtgtttcttgaatggagaagaaatcaactgcatatcatcttattttatatttcgcttacgaattacgatagacagtatgaatttctatgatgattgtacccaatgttgatattacataattgtcatgatcccttttctcttgcatccacagaacatatgacatcttgaacatgctatgtacttcagatactaaccccacataacacttccacaaataagaatacatcaaggacctatatatgcgcttacatatataagtccatgaatattatgcagcttgaatctagggttagtatgaagaaaaagtcgagttggggaagataaactacgccaatgtggatctaccacattaactataaacgatgaataatatatttggaaaaacttgtaactttttttacgagtgcgatactcgatttagctatgatgaatgatgactcttggccgaaattagactagtgcgatagatataatttgacaaggaagtctctaaatggttaaaagaacaatgtcgatcgggtaaagatagttgtagccaggaaggagatcattaacgaggaagatatatatgtccttttggtacaacaatgatgagagtcttgaacggaataaggagatgagaaattgagaatcattcgaaaagacagcgaagagaggcccagtgagaaacattgtttgacttacatttgtacccttgttcttttcgtcattttacgtctgctaccatcacccgctcgtgcatggctaatcatcagttcaatagtaacttccaataattcatgacatgcacgagacataatgatagacaaacagagaaaaatggaattaaagaaatcaaatggagatgaaaaggaacgttatcactaggaacaccgaacacttcatgttcgataggttaggctcttgcctcttggttcattctgattctggttttctcaggggatttctcagactcataccgtaaaatatttttctttttgtatttaagaaataaccatctattaattttgttgtacagtatactggaatgttacggcccaagtccgttgtggaaaaacccatccactcgggcttaaccattgaccaaccataacgagccatttaacagatcgagacccgaaattcatgatggtgaatgtggtgacccttaaagaggcccattccaatgctttaacccctttcctgtaaattagtcaataataaaacaggttaaaaatcaattataatgaaaaataaggtttatacttatgcatgtataaattcttcgccaataataattgctttaaaaattaaaaccatcgcctgatattatatctgattttgccataaagtaaagtagatattacatcgagtcaaatttacagttgatgtagttgtaactaatttcgcaccaaaacgacttctatagaaagaaggaaaataatccaaaatatgattcgtcgtagttgtaatgatgttaaaataacaagtgataaatcttgttcgttctttttctttcttttaaaatcgtgtatgatatgctaattagtggatatgtagcactttcggacttggtgggattgtgatctctttaccgacccattctcattcaatattaggcattaccatatccttttctttagtctttctacgttcacaaggactacatccagggaaaaagaaatatctttatttattaaagtgggtgaccatcagaaaagggagcataattatagcaaaatttccgaaagaatgtatacacatcttcaacaattaatccgtactaaaccttttaccaaacaaaacaattaatccgtacggtaataaatagaccaaagaaaacgatatattatcacatactatcactttgcgtataatgcggaataatatttaattggttacttatacgaaaataactcaaaagaaagcattgcataagacattaacaacaatgacgtctccatgtgtagctgaacttgaaaaatcatcgtagtcctccaccactgatatgcatgatagataatgaaactttcatcttccgcaatattgagcaatagttcaagctcaattactggtgaaaattttgtatcaaaccaaaaaatattggtgaaaatagttcttcacctctgatctaaacataacgtttttcctataatactataaacagtaattaatatgattgtctcgatagttttatttatccataaatttctttggaatgagttagctcaaagttttaaatccaactataagattagtgggtagtagtttgttttatgataatattgtcggtgtgtcagtagtagtactacaggaattcaaaccgtctattaatatgttgttaagaacaaaaaaaaaatcaaatcaaacggtcaaaattagatttatataaataattagattaatctccatggtccaatgagttatagaaataattgattacgtaaatcgaaaaaagtccatccgtccgttaagtaccgtacggtaaggtaaaggggtactaaggtcaaatcatatattgggagtgcaataacaacaacgatagtcgatacggtgaatcttatcgtgatcttcgagcccatgatacagtcaagttatatctaagccgtccaaataattgaagaggctccgtcacctaccactcttgtgttctagacgattattaacccttcagaatcttgcaaggcttctcaactatacgagagttcttaagcttgtgggtcacattcgcatgtgcttatctttctctgacgttgattttgacatctccaaatgtttatttttctattttcaaaattcaattttattttaactactgcggagtgggacgaattattaagcaaaacatataaactttacacattccatgccttaagtatatactttctcacgatttgttagacatttgtaaaaaggtatgtatggttttataaagaaaccaaactaaatgctacattaatgaaacggttgaacatcaacatctagggttagctcattatagaagttacgggttatagcttttaattttgtttctgtctataaatgtaggtgtaatgaaaattaataaaccctaaaatgtatgtatactactatttatggaaaaagtattgtagcagttacgacttttttaccaaagctaacgtagggtctataattgtttataacttaatacagaaacatgtaagcgttttcaaaatgatgattccaaatttgtttaataacatcaaaataaaatatctagcttaccttctaatctcgtagttaatacaaacagttattgcttttacgaatctaaacataccagaaccctatattatatacatagtaacgattccgcaactaacattccttgcagtttttagggtcatttcaacagttttaacggctagaaaccgccgatttagaaagggacaccagtaccatcgttgatttgcaaaaagagagagaaaataaagagatcaacacttgggagtattgacaaattttaaagatgagaaaatattgaaacatattagcaaatttggagagggagagacaaacctctagaaagtaacgaccgtgtcttattgctctgttttcaaggactatactttgcttttcaattttttttgtgcctagagtctaaactatctcagcgatgagatttttctatttttataacacaccgaattatggactccataagtaaaaaaaaaacatagcagctttttactagcctcgctatttaacagaactttttggggaatttgtttactttacacatttgactgcacgcagagaaatttgactaggtccgcgagactaaaattcaattatcacatgcacacattaagtaattatgcaaaaaatcacatttaagtaaaaccaaaggctttgatgatattaaaaagtctcattcatcaaatattaaaaagtctctcacagggtacacattgaacaaccacacaccaccatgagagtaaatctgagaagatgaccaaaaatagtaatcattctcatctaggttttctctaattaagggttagtctcactctaatacatctactaaacccatatactaaccaaaacatctaaaagaaaagaaaatttagtttgctaaaacagagaagcatttactcagcagcttcctctgttcccctaaaacatctcaagtctccaaaatatataactagaaaattttaaaaccctaaaagatatgttcatcggagcatggaggtgagagatcggaaaacgacttcttcacaagggatagtgagacccatgtcatgatcaaagccaaactcttcctcggcttgttggagaagaagctgaaactcaggtcgggtcaaaaacgaaatgggcacaacgtacctaacccgattctctccgacgtagacgacgaagtgaccttttggtacgttaagaggagatccgttttcgtcttcaccgtacacattactctgtttctttcccaagctcgagcacctcttcaagatttgcttgatcatcgccgtttgcgttagcttgtttgcttttttcatcgccattctcttcaaaaaggatttgtcttgtgtgtggtttgagttttcacaatgaagggtgagtgtgaattagagtgagggaggaggtttcatggacttatggttgggggtatttattgaggaggactagagcgagtggaaaatctttttatttatttttaaatgaatatacggattactgaattatgaaaaatgtacatatatacaccaccacaacatgtgtgtagagagagagagggggatggtaatatcgaggcgttgaggagattatgatgtgtttgttgtcttgaatatgaatttgcgtgtttgctacgggtagccatttgttgtgcatttagatgatacaaaatatttaatttgttgcagaattgatagaatgtagaaactcgaaagcgaccgcttgggtcatctggtttggctcgaagagagaatctgttgaattaaattttcttataaaaacggaaaaagaaaatggaggtgtgagtttggattgtaatatagatattaaccgtttcgaaaaatgtgaaaggtattttcaaagcatgtgaagatgtggggtcctagtttgagacgagtatgtgtggaatttgttagacggacggtttgatgcatattgatcttactttcactttttgtggtgcggaatatatttgaatatctatctaattactgattttttttggttcatgcatgctcaacggttatgttaattaattaggtacaacttcatctttcgaggttgattagggtttttattcgaatctgttgtatagttctttaaattggtaatttatcttttattgtctccactttatggttatcttgacacattctcccatttacttgtcccaattttctttcatcgagcgtagggctttaaaccaagttgttattgaatttttaacaagcaaagctcacatgtacgaaacactcaacgtgttacttcatgcacgttgccaaacagtacgatagaaaattgaaattcaccatccaaaaaaaaaaaaactattttacgttttgtggatcttataaaagaaagtgtttacattatattcaaaacaaaaacaaagtgtctactgattattgattaatacattataatactatatcaaagatattttgcatttcggcgtttttgttaccaaagttattggatttttttgacataattttgttgggtcaaagacatcatgcaagttaattaattccctcacctttatccattatgatggatttaagctatgtataatattgcaatttgatcacaaatctctaagaaaaatctctatatatatgtatttcttcaatggaaaaagaaaagtacagaatagtaccacgatcttggttattgaacccgtgaatctacaagaataaaagaaaagacatcaaagctgaaacttcacaaggataaaaggagcgttgttgtacccaatgagccactagtgagtaatattttcaataatttatataatttttaaaatagtaggcctgtaggagtataatttttgtaaaacaatgacaattctgaaatgttaacgtaacacgtataaccgaacttctgtccacttgggaaaccatatagtcatatacagtgaatctttatagtactgaaatgcgtcaaaaaaaggaaaataagaaaggaaaaaacaaagaagcagagggaaggggtcgatgtttcggaccacaaatcgaaaccaagaaaattgtcgtaaccaagcggggactctccaactgtctcaactgactcacatgctctcctaatacttcatgcgtttctcaacttctacattttaagttttaatttctaacattctttgaactttgagatctagatgagtttcaattttacaattttccatttttttgggagatcattagtccattacatataatacttattattgcacccatgtatatatttaactcacccaaagtcaagaatatatacggattatacggatataattcctaaactggatgtttgtatgttttcaaaaccaaatattaatgtatcttatcgattaaaatattaacatattctaactaattaagtactcacgttaccatctttgtgagttggtatcgtacgtggtccatttctttaaaaaagttatcatttttttttggatttatagctaaaagtttttatcaacaaatttttatagaaaaagctaaaagttttcatttaaatcagcaagatgtgcaactgaaagttagataaattatgcaacaagataactgttaaactttttgatataattaaatagctccaagttgcaggagtagcctaccaaaattaaatttgcaaattaacttcctgcgttcagctatactatgcaaattaccaaaattatattcactcgcatggttttctcgtatactatgcatccataatagcaccccgaaggaatccgtcaagattaattgaaaaccatgtaacaaaaaaatatgttgctacatacacaacttttaaaaaaaccttgataaattcgtatgcatgtaagatattcatttattacaaaataatgtagacaaagcagtggaagctgtgtgacacgggtttgttgtttgtacaataacaacgagcctgattgatgaatagtaacaaaatcggcatcgtgtggatgaggctttaaacaaggacatttataaattgggagataaggacttaaaggtgtctcgttcgtacaatgacagtactcgaaccggttacggcttctcgaatttaatatctgcaattaatcaaacaaatgcacatgcaggccgtatatttttctttgcttttttgttgtatataaatgtatttcgtcttattcttcgaatccatttcaccgcatgtcttctgagttcctataaatctttgataatcaggacaaatttaaatcttagaaatgtaaacaaaatatatcaaaaacgacggttaaaagaaacttaccggcttatattttaataaatagttttctttgtttttaagatatatatatttgtattgtgttttacaatctgatatatacaactatatatagaatttacatatatattcacaataaatgaaaaatttctcttaaaattgttctatggatgaaataaaatgattgcatatacgacattgaaacgccgcatccgtgtactgtgtacataatttttgtcttgcataaagatatccgtataacgtccatgcaaaaaagcacgtatatgtctataatgctacatgttgacatgttgtccagctagtatacgacgtatttttaaaacattgtgactactctaagtatgcaatgtattctttaaaatgcattgaaacggggcgatgacggaataaggttcctaacgaactacgaatctctcatctttagaatgagaccaaactcacatgttccatcaacgagattggtcacatgaaaactgaagcttattgttttgcttccaatttttgtagaaactacactaatttcgatggggccctcaatggcggagtagttggtatagacagaatacataaaggaccatcttgtttattttcaagggaatttacaagacacaacaaccgtttattcaattttagccaatgtcctattttttgctgtttcttttcaactatataaaatgggacatgttctacaaaatacaaaattatcttataagaaggaaatgtccttaaaacttaaaaataaaataaacaattatctgccaaaccatatacataaacaacccaaacgattctcctatactatcaaccaccctatatatgctttttaattatagaagtaggtacacacatcattataattcactttttcaaaaactatatgaactacaatcgtatgtggaaaccacacatgatattgacatggcgaatatcttgttggactttatccgaacagagaacacagattttttgtttcctaccagactataccttaacaattctgaatctcgagttacataaatgtaaagataaaatgactcacaaatccgttgtagtctagctggtcaggatactcggctctcacccgagagacccgggttcgagtcccggcaacggagttactttttttcagttacagcgacccaaatcgttaaatgggctattgggctttagataaagctcaaatttccacgtgaatctgtattttttttctttcttaaatctaaaatatctgcagacgtaaaacccatgtaaagttatagttcagcccatgttaaaagcccatgtaaagttatagcccacgtaaaaaagcccagcccaaagataagttgggataaataatattgatgttctcgattgctcgccgggatcgtaagaacagaggatttttctcggccaagttttctctagctcaggttcgtcgtcttctatcttctctttctcctcctaattttttttcatttttgcttatcgtcatggagacgtagtttagattcaatccatgttgttctagtttttggctggtttcataatctgtggttgaatattattgttaggttaaaattcgatttgtgagatctgttagttagattgtacatgacggtgcgaatttattgaatctgtttaaatctattgaaacgtgaaacgcatttgagtattgtgaggctgaggaaatttctgaaagtggttttgggacgatgatgctggtgttgcggagtttgccataatcagatctgtatgtatgtgggtttcttgataaaagttgtatgaggaaggcattggagatttgtgttgaagaattgatgtatgggagtatgaaggaggtaatgttgttggtgtgtgtggttgatgttggcaggtgtttgatgtgaattttttgagggaggggaatgagttcaatgagcagaagcagaagtcgaagtagaagtcgtagtcgggatcggtttcgtagtcggagtccgagagacaggagaatgagatctgaacgagtttcttaccatgatgctccttctagaagggagagggagccacgtcgtgccttcaggtctttctttttttatgtcttgaccctttctccagtagttaccgtaacaaatccatctctccttatggctctcttcgttgtaaccttctcagactaactgacatagaggttagctataatcctaagccgagctggcaatatagccacaatcctatgcttatagccaacatagatgctaatcgagtgtcttccttgattatgacttagacatactaaacaacttttcctctctccaacctttttctctcttctactctttatcaagatggtgtggttagaggaggatcagggttaatttcagtgttcgtcttcaattatttatttgattgaactaatagtgttaggttggtttaagttcaactgtttgcttacatacatactttttgtatcgattcgtttcaatgtcgtgacaaaattgtcacaactttttgattttgttcagccaaggaaatctctgcaacaactgcaagcgacctggtcactttgcaagagactgttctaatgtttccgtctgtaacaactgtggtcttccagggtatatatgtcctccctaaattgattcgtgaatttcctctgtttatatgcttttgagttatgtttttaaactctctctgcaggcacattgcagcagaatgcactgcggaatcacgttgttggaactgtagagaaccgggccacgtagcctcaaactgttcaaacgaaggaatctgccactcctgtggtaaatctggacatcgagccagagactgctctaattcggattctcgtgcaggagacttaaggctctgcaacaactgcttcaaacagggacatcttgccgctgactgcacaaatgacaaggcgtgcaagaactgcaggacttcaggtcacatagctcgcgattgcaggaacgatccagtttgtaacatctgcagtatctcggggcatgttgctagacactgcccaaagggtgacagcaattactctgacagaggaagcagggttcgagatggtggtatgcaaagaggtggtttgagcagaatgagcagagacagagaaggcgttagtgctatgataatatgtcacaattgtggtggccgaggacacagggcgtacgagtgtccgtctgctcgagtcgctgaccgtggattccgccggtactgaggctcttaaatttaccaattgaagttccattcatcttcacctttacccttttagcttctgcactcttgtttttgttgagctacattgttgttttctaatctcatggtttttgtctattggagtgaatcaaggatggttttagttttggtttgttttcggaaaatttgagacattgcttgtgttgtatgaagtattgaacagattagtgtgatgcagagttctgagttttcagaactcaatattatattaaaaacaaattttaatggtttgctttctcccaatctcgagcaatttaaatgtgatgtacgtttagttaggtttaaggaggacaatattgtaagcaatccattcacagtcaaaactcaatttgttagccgatctcgaaataaactaaaagacttgtaagttacacaaaattcgaaaaagataaattcatattaaacgatggaagttttagtgggaggaacaagagatggtcctgatcatctacaagtagatgaaatgaaattggataacgtaaaaggaacaaataaacaaccgtaccaaatactccatacaataccaacttgcagatgtaattatcttagaaacaatgacatgtgaggttgtttttttttggttttggttttacacggcatgcgagtttgtatccagttttatagtaattaaaaatgtggagagacaatgagtataataatttgtaaatggactaaattgttttacactctttcgattcgtttttttaatatatatactcaattactcatatactggtaaaaaaggataaaatatgttagtggcatcattgcctaagttttcttttgtagattttgaagaaaaatgaaaagaaaagatgttgttcattgaaggagaagatttaaagtgttgattggtggctctactaagcctacgaccaacagtagtgttacctaagggatctctttcattttttcttagtttatactatttcacttattaattgattaaccactaattctcttactaacaataagataaagctccatatcatgggtttcaatgataacaaaatgtgatataactactctatagtctatacatataggtagcctattcctatgacaactagctaacaaatattatgatagaagggaaactaaataaatcagaaatgtgagatactacgtctttataagaaatcttttgtgttatacaaaaccaagctaataaattaggtcaatatgcgatctaagaaacacataataagttgacaaaagaaaacataattatgatcgtcttctcttctaaattgtaggaccaaacgtaactttttttttttggttagaaaggaccaaacctatctgtcaacgagaattttcaatttgtataaggggacaaaaaaacaaatgcggtataaatagaggaccaaaacggagaagctatcacatcaaatcaaatacaaacaagtgtacttgcaaactttgtggagaaatcaagaaaatgaagacaatttcttcattggtcgttatcttcctcctcatactgatctttcaaactaacaaactagtgagtgggcatgaccgttccaatgatcaagacacggtcaagaacaacaacaatgatgaaaacagcacaactacgggagtagttgtcagggacaagaaaagaagttataatggaggaagcggaagttatagatggggatggggtggaggcggcggaggaggaggcgggggtggaggaggaggaggtggcggtggcggtggaggaggaggatggggatggggaggaggaggaggtggtggaggatggtacaaatggggttgtggcggcggaggaaaaggaaaagggagagaaggaagaggagagtttgtgaaaagagaatatgcagagtgcaaaggaagaggaaaatgttcaggaaagagattggaatgtcctcaacactgtggaggtttgtgtttctacgattgtctgtttctctgcaaacctcattgccgtcgctagagagagatctttttgtcaattcatcatacattctcttttttcctggttctgtttggtttttgttttggtttctttggtgtgtacccttgtttcttttagggttttctttctaacatatattttggggttctggagtgatgctgaaaaaatagccattatatttaggatcccatctaggtttttttttttttttttttttttttttaattctatcatgaactaaaagttcattaaagaatttccatatgagattttgcttttgccattttatctccagtgtaaaagtttttttttgtctgtgatttctatatatataatgaagatcttttgagaaaagtcgattttgttactgtgtttgaacacaaaaccggtcttgatcacattgacttgaaatatttcatatttctatggaactcccaaatatatgtagattccacatttccatttgttagaaagatgatttatatgaagagtaaaactgtaaaagagaaaattaattagttcgtggaaaagcaaagaggcgaagcaaaacaatataggtcattgttaaattagcaaatctaaataggtgattattacgttaagaactagactcatttgtttacaagaggaattaatatttaagtgattgtttttttgtagtaatttggtatctcaaaccaaagttcacactagtatccggagctatgcaacagtcagtattgaccaaaaagaaaatgtgtcaacccgatatcagcatgatctattctagagcatgacaatgaccaatattatactactactatctcttgatcattattttactgtatgtctccttgttgcttaaaacattatctcgatcttatcctgatcactggatcacataggttagtgagtgtacatatgaaagtggaaaatactttcgagaaattatccaagtatatgaccatagaaaatagttcgaaaaggtgaagaaataaaaatctttctggggagcattcatgactcaaactttaatcattcatctttttcggcatatgttttggctgccggtcacagaatcacagaatcatatgtctcttttagataatgcctttgaggctttgctacttgccagcacctaaaaacactaaaaccaatgaggaatacagtactactaaaaacataaatatcgagtatcaaccatatgaaaagcaaatggttgatattttgaaatcaaaaataggcctcaattagttgggcctgctaaacacaacgaaagatatataaatataacccaaaaaaaaaaaaaaagatatataaatataactcttattttcttacttgtttttgtaccattttagtttggtaactttaacaagtaaacgactagtcggtactttaattaatttaaatatgttttgcctgccatgatgaggtgtccatactccttagtcatcagagatctatgcaggcatattcaatcagaaaacaaaaaatatgccgatgggcgatggtgatgggcacgttattgtgaatttgtctccattatatgctctttttcttatcgtttatttcctaagatatattatttatatacaaaccaaatccaagaacaatcctttccccatatgggctatggggactgaagaggcagaagatgaaaaagaaaagactgtcctcatatactaaaatatacgcaccactagatttcattcatcgaatttgtaactttactttaaagtttgactttcttttccttgagaaaacaaaaataatgtagatgataattgaaaataaactaatttttctctgaaatcttgtttccacgacaaaaagaaagtttacaaattaaacaacgagtcataggattttgtacatgaaacatgtgcattaatggaaagagattatatgattattacaaagattaaaacagcaaaaccgcaatcacactcaaatttacaaaatgacagaacacaaaaaaagagagagcctaattctattgagatcaaagttgggagaaatgaaggagaaacaaacaaacaaaaaaaaaactcccccatttagggagatagtaaaattaccagaaagatctaaactttttattagaagaaagaggaggaggagtgatctgtgggacagtgaagccaccatcatcataccatctcttgttgttctgtccttgttgtttcatgttttgtattggagcaaaagacactacttctggtgatgtttctttgttgtacatcccaaactgtatgttgttgtcttgagaaaagtattgatttgggtatgaagaaggaagagtttgtggaatctgagggacccaaatccctaaattcttagatggaagtgacactgtattgttgttgttgttgttgttgttgttgttgtttctcttagtgttgttgtcatcttctggttccatatatggtaacactccatcatcatcaccactctgcaatcacacaaaagataaccaacaactctttttcagaaattttacacaaatacccaatatagtaaaaagatctatccacatctataaagtttgttacctttataatacattaatacctcattagatctaaaatgatatgatattacgtaaacagaggaaaaaaaaattcaatctactaagggtcattgtcaaatcttgaaatcaactaaacttggatctttcttgattaaagagataagaacaaaccttagagaaaccataagtaggaagagaggaatcgaggaaatcctcaacgtgccaaccaggtaacgtatccatcaaatactcagaaatcgtgcttgtggatccccactgattcaccgacgcatcaccgccgttgatcttcgaaaagggttggatcttgttgctctgaggaggagctgagagaggtttcttgagaggaggaggattagagattgatgatccagggacagagaaatcttggttgcttgaagaagaagaagaagatttcgaagtaggtttgtaaacagacgatgttgcagagagcttaacccctgtaagaagaaacctatcgtgtttctttgtgtgttcgttcgcagcgtggatcgatgaatcgcaatctttgcataaaatagctctatcttgttgacagaacaacagagcttttttatcctagagttcaataaaaagaaaaagtttcagattcttgatcggcaaaaacgattgaattaagacaacaaaactcatgtccgaagttagaaagagacctgacagatgtcgcagagaggagaggaggtgttggaagaagaaggataaaggagagagaaacggagatgtttagaggcgagtttgttagcgtggtggacttggtggtcgcagccgccgcagagagatgcttcgtcggccgtgcaaaacaccgacgcttcttctttatcgcagacgtcgcacctgatcttcatcgatcgattaagagagagatagagatggtggtagttgaaaatgataggagagaagatgtgagatcttcttatggagtagtaatgtaagagggtacttatgtaatatcagctcctcttttttccttctttcttgtttctcaaatcatatctttttttttttgtttaattatatctctctttttcttttcttttttattcctagaaaattatttcttgttttatatgagatgtccatgaagtaaaaaaaataattaattattactttgttggattaataaaacacagcgatataatgagagcttgactgatgagaagtaattatgcccatgatagttcggtagttcctcaatgtaaactaattatattttccagcaaaaaaaaataagaatgatatattcaaataaatttattggcattccattcgattgtttgatagcattcaaaaaaacaaaataaatagaacttaaatagtagcaatgaaaaattttctgtttaattctcctaacttggaaacaaaaaattgaagtagacaatgttttcataatgaaactaaaaatgatggaaaactcacttatataccatcgaatgtaaacaacattaactctttaaaacttcacttttcgattgactaatttaacttaagaaatgtgaacaatcagacaggtttaaacttgtatttttactagtatcatacctatacgtacgcttatgtcaaaacatttacatcagaattaagatgatcgatataacacaaccttgcttttagccgattgatctcatgtttattcaaatttccatctatattatacttcatggcatgcagtcacgcacgccaactccaaaatagaggatcggataagattatatttgaatatatcatcttgttatattttattgtgttatctttgtttagaagattatatagtggaagcccgaagaattttgcactggacgtggatggtgtgaaggctgaagcgcgggtatcgaaccaagtgggactagtgggagtctttccttctacatcaataattaaacagataatgtctcagtggtttccttttatgacaaattagaattacatttctctagtcattttatttttattttgcttttatttctatcttgaattctgaaagattgttcagtcaaaataaataaataattagatgcccaataatgcttattaatttcagttataattttatcagttcaaatatatataaatggaatgaaaatcaaatgtcatttagttcggcttgattcttaatacttttttttggtttttatacagatttgttagctacgtatattttctagtcttaaaacaggggaaaacctagctagcaaatggagacaaaactagatttttctttttagtatgataaaaccttacatggtttcttaaaagtaaaaagatattaattggttcgtatagatatataaaatattaaggaataaggataagtttcaaaatctagaaccactatcaagtaacaaccaaagattataaagtttactttttcaggagtgaaatctagtagaactgtatcttgtaaattactacattatatccctgaaaaagcattatatatattaaagaataaaagattctccaattaactaaaggcgtatgcttaaagaaactttgaacccatattggaatatgataatgatttgaaagttgtaattctcttttaagaatccatgtatatgccccctaaatatctataataggagtccccatagtccatagaaatacccttttagtcgtggaagctcgatccaatgttgcattgttgcagtggttaatcaagaatttataaatgtttctatggtatgaaaatgattgaaaatactcagattgaaaatgatctttgtaatcatatatctcccgcagttctaatgttactaaatgttatatcagtcaagttaatgtagatttttatttttcaaaacaataataaagaaacatgtgccaatcagtaattaacatgtttgatacaaagatatttcaaatcgagattcagtgcagcagtgtggagttttttagacagttctttaaacttaaattcgatattaatatttgagcgcataatacagcatccatgtgaacagcgtctaacgcaagattactttagtagaatagttataacttttgatgtgagctagggagcagacgggtcccacttcatagtctcatctcatgtactacattttatcaagtggataatcatggcgaaaaacattttaatatgaacggcaaatttgttttgatattatttctggtaggctggattatgttcttaattcattattttctgttttgaacattgaaactaaatttcaacctataagaatttgacgttcaaagaaggtagaagaagggatgggcaaagaagagagacaacacgtggctcgtttggtccgccgtgtctctcgtacgttgttcgaagctccacacttaaactcctactctaggtcatctactcccacaatattattgaaattaaacaaatttagtgaaaccaaataatatttgtgtcaaaataatttcacgttgatagaagttaacaactatcccattggttattaaagtatttatatatttgtagaatataataaggaaattagttggatcggaatgggcagatggtggggaggacaatatggaaacctctcgactcttaacagcgatttaataataatgttctttattaaaacgaatttattgattttgctggaccactatgcgagtttcattaatttaacgtataatgaatatgccccacattatttgacatattttttttgaagcatgaaacgtatacagggaccattactaaaaagctgataattaaactaaaacttagagttttatagtgtgtaaaaagtgcataataatccaaattctaattcttactatatatgttgttgaaattaatacgtaatcgcttacgccaatagtctgatctgaagcgaggaaagtgtcatcacagtcaccaatggactgcactattctttttgtggctttacacaaaacatgtaaataatatttaaaaaaacgacgtttattgtttaatgacaaacacgaacaacaaacaatctaataccgtaacacgttgcttatgagaaatggttcactctatatcatgtcaaaatctcaaaaaattatggcttttctggaaaagaaaatataatttcaaattcccaaaaaggtcacaagtggagtttttttttgttgttgttgttgttaaagaataaaagagcagcagataaatggaatttgaaaaaaaaaaaacaagtggaaaataagtttagagaaaaaaatttcttaatgctttctataaacatttcctttatatccatcttttctacttttccagcaaaacaaattttattccttttttcttctctaattggttaaaataaagtagaactgagaataaaattccatttagatgaaaactttgctctaatttgtataaccggccagcctattatattcgtacggcacaaaaattatattttctggaaactgaactttagacaaagaaatacagatttacacttaaaacattgtgataatagttccgttttttggaaagtgatttaaaaataaacaatcgttgtatacaatacaaccgtatacacagtcgtttatattgtattttagtcatatgtggtttcactatatgaaagaataacaacattaaacatcttatattacttaaacattaattttagtaaaatattaaattaacaaatttatatataaagctaaaatatagaaatataagaaatttaaactaacactaaacagaacagaaatatttttgatgatatcttttgactgctttctcattcgtctcgaatatgaaagataattcacaaaaaatatagttttgaaatatttttgatgatactagtattaaatatctacatcagacggggttttgtatattacttcaaagacaaaaagttggccaatcaatcagcatctttcatatccacttcactgcccattctttctttgcatcaacacacctcagagatcctcatcgatattattcgaactgtatttgactatttcgtgatgtgtatttaaaaaaaaataaacgaaaagatcaaactaacttttaaatcacccgtaggatttgattggatcaaccaaattcacgtgttaagtttcgatgtcatataccataaagtctctactacgtctacgatatatatatatatgatttcatttgtgaattccatctaaatatcttttgactgctttctcattcttctcgaatatgaacgacttttctcgtatctgttcaagaaaacagaacaaaaaattgatcagtcttggtttcttgatcataatcaaagaaaaaaccaaagacttaagaattgaattgacctggattaagcaattgttcttgagaatgacaacttctccatgattaatttcctcatcgttcatccatatcgaaaacttcccaagattcttgatttcaaaactcccatcttgcttcaactttattagagcctagttccataaatttccaagaaaactcacacttataaactatgtataaaaatcaataagatgaatggcgttatcaaaatgtatgatgaatggcgttatcacctgtcgtcgagagaatcttgtttcagaccctgaccttcctaagtcgatatccaccggatattcacctgttgctcttccaagtaacacctgacaagttgaaagtgtttttagcttaactatatcacttaatcactataattaagcatcccaagaagattcaataacctctggtttattgatgtaatgcttagagcttccatatagaagagcgaaagctccatgagcagcgatgtcacggttcatgtaagattcagcactctgctctaatctcattatctttcgcgccatttcctcgtttcgatattttgaagctacatacacacacaaccatcagtatagccttttgatacattagaaggacaaatggtaaaactatagtttaagagagagctgattatttaccgtccaactcgtactggtcttgaccaatcggttcaaggtccatgtcaagaatctgattggttcaaaaagaaaacacagtttaagtaactttaaccaagaaaagacaaaaatttacactgacttgtaagagtttatataccatagcttctagatctgaaaaggaaggcaactcttcatcactctcaatttcaatattattctcctctggtacgtttatatccatctctgcactcaatgtctgttcacaaatttcattctctggaaagtgttgtagagttgatgaagttgttgcagcaacagtagatgtcgctttctcagtaaagctatcactgaatgcagaagaagaacttgctcgggttgtgacagcacaatctccaaaaccagaactgtcgataatgtctttgctcttgacttgtaaggatgatcttctaactggaggcagaggtggcttcatattattcctcactgatgaaggattaaccgagtttcgagctttaggattgtacagttgcaggttgatatcatcattatctggaatctcatcggactcacggtttataacacaattgataacaccgttaacgatttctggatgtggatcataaggcggtggaggaatccaaatctctgcttgatcaaggattacttgctgctgtgacggtgatgctggctcattcaaggatgcgttaggttgttgaaacagaggatcttgaaacacttcttgaagcagaacatgttctgttgttgttgttattgtgtctgtaacataagagtcatgaatctggtcatcgttgatgtttaacatctgattcaccattcgatcatcctcatcatcaatctcattaccaaagatagttgtctgataatcatgaggggaaagcaaaatgtctgggaaagtgttgcgaaaactttcaatgtcctcaaacttgaaaccaaaatcatcatcacattctccaaacaaattcccttcctccacattaagatgttcatcaatggcattgttattgaccttaagagactcctctaactccaaacgccgcctttttcgtgtagtgtagtaatgagttctgactggtactgaatcaaagagactttgtggaacgaattgagctccgtattggagctcaaatccgactgatgaagacagagatgtaaccttgggattgtaaagaagacaatgccatcgctctgttagttctgaaagtgtaaattttcgagagaatctcaccgctcctttagctaacgtctctagagaagttccatcctattattatacaaggaattaaactccacaaatcattagaaattttgcaaatcttggattcaaatatcgactatttgaatcatagattctgaaaaatttaacaattgattgtaagaattaacaaacagggaaactcgtaagaactaagaaccgatataatcaagttttgatcaaggcagagtattatgacttgggacacaagtatgttaattatcaaacagagaaaagcttttaaacgctgcaataatttagggtttcagtacgagattcagtaacatcatactcgtacgggaacgcaagatacgaaaaaaaaaaagataacagaaaaatcgaaatcgaaaggtttatgaaattaaaaaatcaagattagggtttcgtgaaaaaactaaacctcgagtgattttctgagaagataatcatcttcaggtaaccactgaaacgccatcagagacgcagatttaagcttttcaccgattaacgaaagaagaagcttctattaagtcgagtaaataaaatagatttagaaaggaaatatttaccagagaatcggccacagaatctttacttctctaaaattagcgtttttttagccaattaaaatctcttagtcttctcctattacggtttaattaagtcaaatttcttttgaaagttaatgggcttcaatcttggtccattatgatatttattaccactgacgcacaaaattgggctgtcggaggccgagtccgtaatggatttcaaacaattattgtatgtactattgatgcaaaataataatttagtgtttaagaacaactactaattaaatttctatagatcaaatatgccaacccacttatttattctgaaactagagtgtagtgctaaagattcttgaatagtgtaccactaataataaaagctatcgcaagtttagaaaataaacgtatttatacatgtgagctatataatatgaagatatataaataagaatggtggtggtcacgtgacaaggagtctttgtaaccttcgtggagaccacaacgctgtcttttcttcggccggtcttctccttaaaaggcatatataggcctattatattatacgtttatatatacatacttaaatgcttattgaacattagtatttatatatacacatttgatacttagctagagcttaatgtgaagcatgtgcatggatgtgagttcggaccccacgggctttatgaggcccataaagctaatggagggggaccacgtggcaaggggctagtgcctacaagtggagggatcctaagaaagtaaagtacgtataagtttgatctcgtgatcgtacgtactgtttctactattggcatgcagtgttcgtcgcctagggtttcagaattagacttccttattatacctaacttgtcatgtattccaccacagttacaatcactgaatcacatcaccttatgttttttttgttttttttgttttttttattgtttcatacacatatacgatggggaaaatcaaataaagttggtgaatgcacgcgatttcaatatgtaacgtgttcgtagtcggaggatagtacaaccattgtaaatcccataaattagtatgtccaatgtattgatcgcgtgtatattgtataatgcgtttatattatattggataaagtttatgctcaactcaacgcagtaaatcgaatatcttagctttaggaagacactttgcgtcacttccttcctttttcttcaacaagacaaaacccgtttctcgcggaaagagcatagttataacttagctttaagcaaaatgatggtcacaaaggcataattgggaatttatcatttttcctaatttttagtaatcccctctatatattatttcttctttaagaagtatttttgattactaaaaacgtgttgacgtggcacaaccatgttaattttcagaccttaaaaaacatgacaatgatttgtgaaattacaatatttttataagaaaacaacaaaattgtaaataaaaagcatacatttggtttgagttaaatatcgtctctaagtttaaaaagaacatttttttcttttggtcaaacaactttaaacgaacattttatcaatcacttgtatttaggtttaagtataaatcctcaaattttgatcacagtgactttgcatcggttgatttttattaccctcacactaaaaatgaattgttacaaattttgtctgcttgaatcgttttcgacaaattttattggtattgaatccaaacataagttaaaaagcctggaacttaaaagaattttaaacacagcgtatatataatagatataatcattgagaagattgtcgggaaaatactgttagtgaggagaatgattgactaccatataaaaagatactagtactatataggagagagagagagaggagatgcagcgagaagaaaggtgagcacaaggctcgagagtgaaagacaacaactaaataataattggactattggagctaatccttattcttgatttttcccctacgatgacctttgctcctcactctctgtctgacttgtgggaggtgacaaaatctagtaatagaaagaatcataattataacaaccgagaacacctcggctaaaaaaggaaaaaaaaatagatcacctctgataaccatgccaatgaacaccaatgcccacaatctgatattaaatagtatttcgtcattgtgatctatggctgaataatgctgggcattgcttcggcattagctaaacctttattggctttactgtgaattgaagctaactctcggaaaaatatacacatttttataaattaaaaaagaaacattagatgtatcctttaaaatggaatgatagtgtttgtggtgtttttagaaaaaaaataagagtgttggatgacaatgttaatcatttgaacatgttggataacttcattgcctacgcatgactacaatagcattttttgttgtttgtaaattgagttaaaataacataaattaagataataagatataattgggaaacatgcatctatatcaaacgtgaattagctatgcctgtctccttagagaaatatcaaccgccaaaaagtaaatcagtggtagctattaaccccgtcaaaatgtcaaaaaatgaaaaggaaaaaaaacttaataatgttagccaaaggaaaactaaagtaaagaacaaagacaaaagggacattagccaactagtttaatcatgaagatcccgattcatcaaagttaggagtgttaagtaattacatttacaaataaagacaaaatagtgatttagtcaacaagaaattctaaaatacaaaagactcatgcctcgggcccttaaataagatcaagtccattttttgggtgggtaactaatacgtacgatcaacctttctatagatacacgcatatataattgttgtttactaaagcttaacaaatttaagtcgtattatgttaagaaaattctccttttttctagacacagatgtttgggatgggattgggctttcttttctctctctctcttttttttttttttctttttttcctttttttgattgaacagatttttgtttttgtttttattttttgtcctacaaacgcatttcaataatgatttttctttgacatctaatattgtctgaaaactataaattgttttctttttgatatttttacgtattgtttccgatgcatatcgtttttgataaccatattttatggagcgaacccaaattaatggttgatgatataggtgattggcaaagtgaacacaaaaacatgtaaagactttgaaacaaattgaatactttaaatttaaattcacatttgagtgatttgagagagttaaaaatctctaagaactattccaagaaaactcacattgccttcattttgtacgtttgtttctctaaatccaataagtatgccttttttataaagcgacaaaaatacttcacagccaagattttaaagtacttgcttggttcataaagaagcatttgctcaccaaaaacaattaaatacgcaaatccttacaacatgcataactcattttttttttttttttgtcaatcgcacatctcatcttcaaggattagctagtaatataggtaagagactttatcttgagaaattggttgtgtattaattggctcgtcgataccgaagatttgatcaaatctagctatgagaattggagaagtaaaatcttactctcgtgacctgcttattatgaatatgcatgagaagtcgtcaacgattggcaatacaaggtggaatagactcgtaaattttgaaataaatataattcacaagttaaatttgagatcatgcgatggcaaaaattaggatatgaaaattggtaatcagttttgaagtaatgcgagtgttattaagagtttaaggtatgtgggttggtcgtcgattacaaatatgaaatatctttaaatatttttcaaactttgaatagaccatatacttatatactgtacatgcacaacatttaggataaagaaaaggcgaaccatcagagatataaactttaaaattaaataccaaatgcgcctaattatgattataaaatgcaaattgcgccgctaattcccgcgattccacgtgatcaaagaaactagagtgggtctgcctgcttcggctctaatgagggtacaaggtatgactgaataagtaaatcctttagtgatttaaattttaaattcgcagatttatgtacgaccaattacgtgatagtataaaatatttaattagttggtataattaatagtagctagtttaagataaaccactaacggtttttatgtactcttaactattctcatgtttatgcaattatgtgtgtgtacatatttatagttttaatttgtaaaacgagcaaaataagctaaataaccctcatatcccgtttagttatatatttttccaaaatttgaaactatatagtactgtattaacgtgaaagctaagttttctacttcgattggaataagctaaaaacctttaaaaaaaaaaaaaaaaaaaaaaaaaaaaaaaagctaaaaacctgaatacagaaataatacattatattcatgtattagtttgggtaaagatggaagacgatcacatcccttcgtcggctaataataatgactcgtgacctagaactagactagggatcgctgtccagcaaaaatcccttaaaacaaaccacatagttttttttttgtttttttttcacacaccacatagttttcttatagttcatattcaaaaagtgtttaagtttctacgatcgccctcttcatgtcgattcaatgttaataccacgtatttctgattagacgaataaataacaaaattatcaaaaaaggaaaaattaacgcacgaaggcgtcgttgaaaaagttatgtcattgaaagtctaatcgccgtgattaagcggtaaacctcacgatgagaccgtccgtgacgataaaatgtcaaaggaatgtgacgttagactatccttttcattttttctcagatttcattttttttttcctttttctttatttcagacttttatctttgccttttttgttttctcaaacttcccatatataatttcatcacaaaatagataaaccgaagtaaaaagataaacggtggggagggttttgcgggggagggacgagtggagaaaaactccctgttctaacacgtggcactctattcaccattgataaaaattaacactatgagcttaaaaagcgagctattttctattttctagtttagttttaaaagaaacaacattttcgctaagaaatttcttttaattaacacatcttaaatttttaaaatctactaaaacgaaaacgagtcattattaaattcgatacgttggttcggcgtaatatattttatactccttcatgcatattgttttgaatcctaaaaccatcgattagatatataatttgcatctgtggacaaaaaaatgacttcctacatagtaaagaaaacaacgcgtcatttaatttttatcatcttacatgtattaattagattgtaataagggattatgaaaatacctatgaaaaatgtagagaataagcatatatacatattaatggaatggaatgattactctaacaaaattacttaaaaaatgtcacctatctatttatccatattcctttttttttctttttttttcaacaatagtttgagtgatatttatgtgatggggattcactcaaactggaagataactgtagtgaagtgcccaaagcaaaagatcttcatgggactctctatgtcttaaaaactttttttctctctctctctctcttaatccaccgagtaaatccagcaaacttccactttcagagatcaaacttgagttatcttaagtgatgaagaaagactaattccatggcggcgtttgcagtttcttaagcttcctcatcatctaccgtcaatctttatagcaaagaaaaggaaatcaaatcaagatttacccttttctttgatttctctttgtggtgtgttgggtgtgtgatgttgattaccactggggaaagaaatggcagggttcttctatctaggagggagagacaacaacagcaacaacaacaagcaagatcatcatcaagtagacaaggatcatcatcatcaagacaagagcaattatctttatctttacaaagacgagatctataataacaacaagggtttcgagatttggcctccgcaatacttccaacaacaagaacatcaacaacaacaacaacagcaacaacatgcctcagctcctgcaaacttctactcatttggaatggttcctagcggaagcagcagcaacaacaacaataaccgtagccggagtttatacttcaacgtagtctccgatcatgagccgggagggttcacggtgacgagacaaggaggtatgaattgtcaagattgtggaaatcaagctaagaaagattgtcctcatatgagatgtagaacttgttgtaaaagccgaggctttcattgtcaaactcacgttaagagcacttgggttcctgctgctaaacgtcgtgagcgtttagcccaactcgcttccttgcagcaccactcagcctccagccgtgaaacgcaaaacgccaaacgccttcgagaagctagtggtggtgataataatgatgataaagaccatagtggtggtggtggatcggctcttgctaatacccgtgtggtgaatgctaattctaattcaggtaaaattcttgatgatattgaattagctttcaagattgattaaattttcatgaaaaagtgtcaaagttttaattatgaatgtttgtggagaagtacaacatcatttgcgtgtgaatgaggatgtccgccggatattgctgctttatttatacaagttactgttccttagtaaacctgacgacataaaaggatctaaccaagatcgatttcatgtaaaaacaatgcaataaagattcgtttttgtagatatgaaatgggagctacgctttataatcaacaacatgttatactaaaaggggctaaaaacaaatctcatgtttatattttggtgatcttataatcattaataaaaaaattagggttggaggtgagtcaacacttaccaccggaggttaactcaccggcgatattccggtgcgttagagtgagctcaatagaagaggatgaagatgatcaagcatatgcttaccaaacggctgtgaacattggaggccatatcttcaaaggcattctctatgaccaaggaccagaacatcaagataatcatcaccttaacctacttgcttccactgcaaccaccaccaatgtggaggagaccgccactaagactgtcaccggtaacaataataatggattaatgcttgatccttcttcgctttacccagctcaactcaactccttcatcgcgggtacgccattcttcacacctccgaggtcttgatcagattctgatatcagttattgattattgttaatctttaaacgttataataataagaggatttcttttgtttttgtttttgttttcgtttatctatttttgaaacttcgtgcaatttggaaaaaacacccttacctaggttgttacttagtggtgattaacatgcatattgtacgtacttttaagaaaagaagatagtgttcatgtttcaaagattaatcttttgctttatttttgttcattaggatcgatctctgtgttgcaatttaaatgtggtttagttatagtcttatgatattaattaatatataatataaccctctttttattgatttacgacatatataattatatatagtacttttcaaggtcaaatcaaaaatacttattttagaaaagaaagaataataaaaatcttttggtttgatattgaaatagctttctggttggtgttgagctccaagctacctttttccccgtttatccgtttgcttgccggatctaaacatgacttaactaggtttcgtgttccactgatcaaagatttgaaaaaaaacatatacttagtaaacttcaagcaatttttatattacccaattgaatttctccagagtgaaagatgttaaaattagttctcaattgtaatatatatatacccaacaactgagaaaagatggaaaaagtttagttaaaaactggtcctgggcggctttaaattatatttatgcacttaaatttagcttgtttatatctttctctggtttgagtcatagttgaataatccaaaaatctacataaatattttgaaaaagacctctagtctcatggacaggtttttacttagataatatcgtgtcattccatctagattcaacccctgtctacaataatataggaggttaacgttagttatgtggagaacgtcagattgtgagtaaatacgtaacatgtgaaatgttggcgtagatgaatgtaaacggatggtaatataaagtatttatatcaaactacttccctgcagaattatcatatttttagctatttaattattacttgcatggatcatggatgtgactatcagtcgtctgtagctaatccccatttactaattctgtcttacagaataaaaactggtcgatgcagtatatatatatatacaaatgactgattaagacatatgatgaaactaaaattgatttcgtttttctaatgagatgatataataatttgttttatctatgtgtgaactgatactgttaacaataataatgattagctagtactattaacagtactgttatagattgcttgatttaggacaagtataaatgacagaggagatagatggaagtttctcaaaaactgtagagtgtctgactcacggcatgtgatctcttcttcagtctctctcgatcaaaattattataaaaattaaatgtagttgatccaaaaactcatgatcatatctcctctgatattttacttaatctatctaacttcttgtttcgcaaaaaccctacagcctcatggtattaaacctatatatgggttttttttggaactatatagaacttctctctagccataacttattataactaatgtgaattatatatttgatattttttttcttctttattacgtaccgatgacgtgcatgtggttccaatggtaagtactcagtcatcctcacaggtcaaatgtttggcattgtcattaattgccattaaaatacacggtaggttaagtttgaaataatagttttttctgagatagttagcaagtaaattgttaattaaatatgctggagaaagggaaattaaattgttgagaagcatgaagatcgtccaagacacatcatttgtgaaattgtaaagtctatggtcaaagtgaaagactaattccgaacaaagattttcctcaacatctgttatacttatacctaactcgattatgattgatatgacagtttcttttcttttacctcaatttcctttacaaaaatcattaaatcttccaacgcgtcattagatagtgaccatgtgaacggaattcgtaaatggggataaataacagtttttcacaaatcacaacccaacttcagtttttccctgagatgatttggctccacgtaaatctttctctgtccatttgagatgatttttattcaaaagattcatggctagttcgaacatttttcgaagtatacctctgaaaatagttattaatatatgatgttactatttgatgctctgtattgaaaaaataaaaatcaaatctagataatgtgttacgtactgataattaagatatacatacacaacaacgtacactgaagctaactgagtaaatcttttatttataagaagtgtagagctaaaagttaaaactatatccaacaaacataaaatctaaatacaacggccataaacctagctacaactacagttacagctataaccaaaaggagaaaagatgagagattggtccccctttgtacattgaagcaactgagtgaaactagtggttagggttttctcatggatttagttaagttctttctaagaattaattcattgtcgttgtcctaatcgccaatccatttccatcctcggtattttgtttccttttttgtcaacaacaaccttggtgttctctttactctttatcagcacaatagtggtccaaaagtccaaacaatatgtatgtgatccatttaaatttaatacatttatacatgcaccatacatccatgatccatgcatgctctacatgtgtttatgtatgcagtatggacatacatatacccctattaatcatgtcatctatactttagaaaataaaacaattcaaaatgtggcaacaagaaatatatgtttttgcgaataacaaacggcccattaaagaaactggattcttacaataatatgggccttggcctatttgttttaacgcccaagtcggtccacgtatatagtaacgggtcgggtcatatgagatgggattccttttttttcacctccgcttcaaagtaagaagacttaggttttaagtcaaaacgaaatcggaagatcagacagagctcaagagaagtaaagaaactgcgacaagagaaagaagattgactttggagaagagagagagtaacgatggaagatattcataatctcgatatagagaaaagtgatagatcgatttggttgatgaagtgtcctgtagttgtagacaaggcatggcacaagatagcagcttcgtcgtcttcttcttttgcttcctcggattctcctcccgacatggcaaagattgttcgcgaagttgatcctctacgggacgattctccccccgaggtaatttggttcttaaattttgagttttagctcaaaccctagattgttgattgattagtccgtttttatgaaattgagtgttgaaattacattacttgtgtcgggagcttgaaaaagtttgaatctttcatgccaatttcactacccatgtggttgattttcaaaacctagcttaggggtggattattcttcttgcaacttattacctttgttttggtattaatcagttcaaaatgtatatggttggtgctgagtatgggaacatgccaaagtgctacgctttgaacatgttcacagactttgttccgatggggggcttttccgatgttaatcaaggtttggattttactttgttctgattgaatacattagatttttgtttcttcgtttgcttttattctcatacttggcaagctactctaggttgtgcagctgctgaaggaaaggttgatcacaaattcgatatgaagccatatggtgaaaccattgaagaatatgctaggctttgtcgtgagagaacgagcaaagccatggttaaaaatcgacagattcaggtctgttttatattttcacattcaggtgtttgttttcctttgcttctcctatactggctcttaagtgtaaggacttttcttccttgaatttgcgctaaaggttattgataatgaccgcggagttcatatgaggcccatgcctggaatgcttggtttagtttcctccaattccaaggtaaaaatgttattctcttctcaatgattttgcatatatggtgtaatcattgaaatggtaaagagttagtgaagcaaccaacaatccagcttcaatactcaatccaaatttttatctttcctttgcctgatcagccttacgattgtagaagtttgtgtttgtgtttgaatgagcaggaaaagaggaaacctcccccagtcaagcaaaccgaggtgaagaggacgaggagagatcgtggtgagcttgaagctataatgttcaagctatttgaaggccagcctaactggacattgaagcagcttgtacaagagacggaccagccagctcagttcctgaaagaaatactaaacgagctgtgcgtgtacaataagagaggatcgaaccaagggacatatgagcttaaacctgaatacaagaaatctgctgaagatgatacaggtgggcagtgaaatcaaccccttgtgtaattcactattatatacatgtgacatagtcataacattattataaaccctgagtcattattcatcagaagaaaaaaacaagattttagtagggaagagaaaagaggggttttaagtggtcatcttttaatttgtatctttaatcgaaacagacaaatataaaagagagtttttgtttatgacatataacaaaattacaaaatcatgtggcggtttggttggatataaacatataacgaacacaaagtcttgtccaaagagactgagacgtcaaatgtgtcttccactgcttgaacattagcgtgattgaacatttgaaaacgaccttgattcttcttctataaaatgcgtccggattattctctctaaagattccaagttgttaccatttgagccgtaggttgggatgatgtatattaatggaagagacaacaatgtcaatggtaatgtacttcctaccttttatttgtggcagacatactaatcgtgtttacattttgacttctccttctaatactcaattcaaaagtgtcgatcacgtaagtttcgaatgaatcggatgagcaacatctcattttctttgagtagaggattttagattcggattcaatctcatagaatatgtagtatgcttttctgtataactaactactataagtcatattagtacagaaacacgtgtggcatagtgattacggctttaggactaagggcataaactcgctacaagcagggattggattttctactcactttcgggattgtgccgtcgtttatgtaaaatctagataatcgatgctaatctactaatattacgtgaaaaaatcgaaaataatttgtttagaaaaattggttttaagagatacaaaatcactagctacttttacaaaaacaattacaacttaaatactcttttttttttgttaaagatcagatctatattatagactaatatcttatcataattacgccttatagatgggaagaaaacagcgaaaaaagcatgcaaaattaaggaattatcattggtaactttaactgttagcaaaatctttttctttccttttttcgatggagcctgtgattgcaaatgttgaaaagatataagttctcttattgttttctttgaccaagtcacagccgtaaacgaagaaaacaaacagatgaagatagcaatgaagacatgtaaaaataaagtgtaattttttatatagctgtaatactttgttacataaaaagagaagttgtgcaaatgccttttttaacaaaatttttttttaagaaaataaaactatatacctagaattagcttatcaagcacaaaagcgtgacttaatcaaaggaagagataaaataaataatcatgtttaaggtggaaaatataatgtaatcttttgacggaaataagaaattaaattctggtctgtttttgataggattacattttccagcttaaacatgattattttattaaattatgacaattatatcagtagtttaatcatgtcggactatctctaactaagaaatcccaccaaaatttcatgtcaataatatagtggatggcttgaaatttcccataattaatttatgcatgcatgccaagcaaaagcaatcgagatgaataaaaacaaaagtaaaacaaaaagtcagtatatgtttggacttagagaatacctcgcatgcaaaaagccaacccacaaaatagttgcagaaacacataattgtgtattacttcaattttttcaagatgatagaatataagtttttctaatagaacaagcttttcggatattctcaaaactattggcaaacttgcacaagttttgcggactttcacatgcatggtttcgaaaaatttaacaaatatttggaaactttcaaaaactgttgtctgtagccataacatgaactgtttgtagtaatttacatatgtttacaatattaacaaagtttttaggaagttaagaaaattctaataagtgcttaaaaactttgacatgttcttataaattttcatgtattttccatgtaaaaaaattctcaccctttttactggtcatttaataaaccctaaattgtgaaatctaaatcgtaacaccaaaatcctcaaacataattgccttcttattttaatctctagagttcattatgtgacgaatattggaatcgaggagagaccaattcttccgttgtgtgttgaacctgacatgatgacattgtctataaaaagagaataagcgtcagaaacttaaaatgaaataggaattttttttaataagggttagagtttctcatgctacttttaaagaaaattaatgaaattatgtcatttggaaacttcaaactttagaagaagttccactctaatataaacatacggtacagttgacactaactcattttctttatttttgtcacctgcaagaaactttaaaaaatcacgttggagtttataagactccaacgattaaacgcttaacgcttaaagtagttttacgctagctagttcgctttcttacgaagactgatacattcggatcaccataattatagttcgttgaactgaaatcaagaaaaagagagagctgtttctgttaaacgtattgaaatcacgttagtgggtaaagtggcattagtcttataataatatgttgaagggtcatacttgtctcgtccttatagtgttgtcgcacgtcaaggtgtcttcttagtgacatccacttatcatcacaattcaaacgaatctaaggacactctatatcaaatatcaatcaaagcatcggatgaaaactttatatgcataatctttctattagacacaagcatatgtatatagatatacaccattgaattgcatgtgaaacagtgcagttatggaggtgtgtatacagtcattaaatgtgttccagttttgcagaaccgtgtctacgttcttcagacaatcagtcggaacgttttatctttgttgattatgactgatcacaagtattgtcgtaaataagtgatagcatttagcgtatcggataattagtgaaagaataagagccgagtttatataacttggtcatattaagattctaaatttatgcattaatcttctcaaatacctctaaaagtaatttacattcttttatcttggaatttaggttaaaagctaaatcttttgtggtaaagttcaaaagtggagtgagaaaaagagaagagagagagatcggagacaagaagattcgctcgtgggcgagcaaaaatgataaagaaacgaaataaagtgaggaaaaaggagacaaggcaattaaatattccaactaagattggtctccctcttcttcttcgtctgctcgttaccggttactatcttgttgggtccttacccgatccgttactgtcttgctgggtccttacccgacccgtttctttaccctttaccgattgagagagatagacttagatcgaatatcatcctttatatatcgggatcttctttttcatcctaaaaagggttttgttttcttccttttttaactaaataagggtttatcttctgtcacaaagaccaaaaatgctaattaattccttttatttgtattttaactaaacacttttataagcactactgcactagttccggaaattgggctaattaatagtgaaactttagtctttaccatcaataatacgcccttcttttataacaattgatgtttagtgatctttcatattcattaaggaacaaactaaaaatatttcatcctaccatctactgatctacaataaattaattagtgccagtgttgtgaaattttgaattaaatttgacaccttagttaattatgagttcagtgcttgtttcgcataggtaacaacgaatcatcatttgagaatgatataaaacaacctaaatatatgcaagtgtaaatcatgaacctacgttatagatcctaatataaaccatatataattaacaaactaatatgtgctggatttggtatgtccagctgggtatgtcttcatttatctctcaaaatttactgatactatagctaatagctatatctgaaaagagtaattcccaatttcaacatacaataacaagatattcatcaataagatcacttttactagttatgaacagtacctggagaaacaattgatatttttcaattatctaccatacacatcatcgcgtaaatcaaaccctcaaattctgaatgaattagaaggaaaactcatgccaagacctctggcaaactacgtatttttattatgatgaaataatcatttacaagaattgtagacagatttggaaatctcagtatagttaatgaaggggtctgcctcgacaaatggcattatggatacggttgagcatacgtgtaccacttgcacggccagtttcatcacatatatacatactcctttgacctttcttaagtttttttatttattttaatttaggattaccccgaaactacaccataaaatttgttttcaaaaaacgtcacaaccttttcttgtaagaagcttttctacaactaatctagtaagattttacaaaactgtttcgatttttttttaaaatgctgatatcattttgaatgtcccaaaataatcccttctttaggattactggaaatgttttaacaaaattgttttagtgataatgtttgtagctagaactacaactagttatttatatattttgataaatttttaattttgtaggaacaattttctataaatgtagaaaatatttacagaagtatgatattattagaaacaatgatttcttatacaattaaaaaacatgtttcgctgtgtattgagatattttctattcaattttgatatgaatagcatctatgtcaagaacagaggatacaaactttagtttaggttcatcgggataatggtagaataaatatattttataaaatagagcaattagataaattagtgtaacgtgaaagtataactaagtttaactagatgtattaaaatgttaaggtaaatatctttgttattgttcataaaaaaaaaagatttttgtaatagaaatggaatataatgaagtaatgaaaattccatattgttatattttgttatgttttacatgttgctgcatatagtttatctaaaacagatttgtgacaaaataatattccatgaacaatttttgccatgatatttcttttgtcgtgatacattcgtggaaggaaagaaaaatacatatttggtttgttttcacgtggatatgcacatgtttctgtgtacaatttactaaattggtttctctgggtttacattgtcgatctctccaaaaataacaagacaaaaagaaagagaaaaatgaaagcatatacaagcaagcaaccataaaattttcgatgattctattctatagggatacaaatgtatttgactattggaaaacaattacacacgtctattcgatgagcacaaaaaaatagaactaaaataaattaacaagaaaaataaaactaaaataattgaggacaaatacagataataatattggtgtaagcgtgtacataaatattgatcgtgtgggtgtgcctgcgaaataagaggtactgtgggtctcacggttcggcagtgcgcgtggggctcgtccctacaaaattaattatgtaacataaataaaatcaagaaatatatttaccaaaaaagaaagtaaataaaagatgttaaaacgaaatgtcgtacatttataattaagagtgttattctcctgaagactatactgtacaagtaataattagtagcaatgccatgctgctcaataaatatcaaaggaaaggacaaactaaaaccattataatgtctacgatagtgagtgcaaattgaggaatagagtcgtaaataatgatatattttgtgctttttctattgttatttttacctttttgattttcagaattaaatgattttagatatacaaaaaattaagaatcataatgatggttgcgttaatgagtagtggcgtgagggttgtcatgtcagctaaacagcagaaaaataaaagaatgtgggagacaggctttgcccttttacacatttttaagctctcttctttattttctaaaaacactatagtacacagttaaaaatttgcgggccctttgtttaatcgatttagatttaaccaacagcttcatagtcgtttcttcttgttagaaatcaataaatgaaaagttggttgttttgaaagcatataattaactaacaatgtatcatgttgtgaaacaaaagctgatgataaatgttaaatatagtgtccaaaattttgggaatgtcttcaaattttgattttaaaacatatgagatgtaccaacatccacaaaatgtttgtgaagttgtgacttagtgagacgttgtcactttattatctcgttttggtaacggtaagtgcatgtgaacgtgtttgattataagtttaacccgactttgtttacgtggtcatagtttccaataaggctaagtagaatagtgtatgatagttttcaattcaagagtcttttttttccaagaaaatccgaaaacacaatcgtttattttaatatctcaaaagaaatcatatttcttaggtaaaactatcatacgttgagtttttctttctccttttgcgattttccctgaaatatatttatgttgtgtgtgtgctttgtaaacaaaataataatgaacgtaataatagtaaaacaaaaagtaacctatattattatcatacttgatataacccaatagagaaataataatataaattaaaattttatttcccaattcaaaaatcataatcaaggagtgaatgctgccagtagaccaaagtaacaatatttggtgtgtacatcaaatgataggaaacaacaaaaactcattaatatacctaaatccatatatatatatatatatatatatttcaatatttcacattgttataattaggtttaatagataccatattagaaatctcagtatggtggttcccacaagcaaagaggggaatgagattgctatctacctatatttatatctccgcaacttcactcttttcctcaatcaacacacacaaacacacacacacacagcctttttccttcgttgatcgattgttaagctcgatccaatggcggataacaccgataatcggagatccttatggggagttccggagaagcttcagcttcacatagcgatgctgacgttgcaattcggttacgccggattccacgtggtgtctcgagctgctcttaacatgggaatcagcaaactcgtcttccctgtttatcgtaacatcatcgccttgcttcttctccttcccttcgcttacttccttgaaaagtaaccttctattttcacttcacttctttatttgaaaaccctattttttctctagttgctagttatttaattaccaaacttaattgtgttaatttaggaaggagagaccagcgattactctcaactttctcatccagttcttctttttggcactcatagggtatatatttatatccttcactctgatcttttcaataacaaatttggataattagttaatgaattattacacgacagaataacagcgaaccaaggattttacttgttgggactggacaacacttcaccaacatttgcttcctccatgcaaaactctgttcccgccattacctttctcatggctgctcttctcaggcacttactctacacatctctccattttcattctcttttgatttataaaaataaataacaatattttggacagcttggatatacaagaaccactttaataatgtccatttgacttttcaacgtaaaagaaacggataataatacacgtagacaatatttaatgccgtttccatttgcttacaaaatagtgataatcatagtagtaacaacaatgtaacatactgtttatgtactgtatgtgaaaaaaacaataattcaggattgagaaagtaagaataaacagaagagacggtatctccaaaatcttaggaacagctctttgtgtcgccggagcttccgtcatcaccctctataaaggtccaaccatctacactccggctagccacctccacgctcatctactcaccacaaactccgccgtcttagcgccgctaggaaacgccgcgcctaaaaactggacccttggttgcatctacctaatcggtcactgtctctcgtggtcaggctggcttgttttccaagctccggttcttaagtcttatccagcgaggctctcggttacgtcttacacttgtttcttcggaatcattcagttcttgatcattgctgctttctgtgaaagagattctcaggcttgggtttttcactccggttgggagcttttcaccatcctctacgccgttagtttttctttcatctgttataattaattcgtttttggccctaatgtttcaaaataatcaatttggtcctaatgaattgatttaacttcagggaatcgtagcgtctggaatcgcgtttgcggttcagatttggtgtattgacagagggggtccagtcttcgttgctgtttaccagcctgttcagactcttgtcgttgcgatcatggcttctattgcgttaggcgaagaattttatttgggcgggtatgaaactataataatattagtggtttatataaatacttgataaaatccaaggtcctaaacaagaataattttaaaatttgttgtgccacatgtcatatttctaatggcaggattattggagcggtcttgatcatagcgggactttacttcgtattgtacggtaagagcgaagagaggaaatttgcagcgcttgagaaggcagcgatccagtcctccgcggagcatggtattgaacgtgcacctgtttctcgcaactccatcaagtcgtccatcacaacaccactactccatcagtcaacggacaatgtttgactactttggacaaatcactctccagctaataattacaaatgccattacccaattaaaagggaacaatggtgtgccgttgtgttttatgacttttgtgtctgctttttttcttagtgttttctcttcttttttttttctaaaaaattattaattacctaagaaaggtttttgaagaaaggaaaaaaaatggtggatgagacatcattgttcatgaggatgatgatgatgatgatagtgatgaagaagactatgtgggagctttggattgagacttttctatatataatatctggctgatatattagtgccattttttcttacatttcttgtggggtttttctttcctttatcatcaatagaatgttataatttgcatttatgatctttagtaattatcactgtcggggatgtttaaaatggattagatcaaacgctttgttctgaactgaagtaaaaaaagatctttagtatttgattaaaatgatctcttaaagaaacagtttttttttacaaatttagtttattatcaaatatccaataaaaattcttaaccgaatgaacaagttaaaaataaaccaacatttaatatatataatataatatggaccaactaagttatagtatggaccaattcttgagttgaaagtccatagattttaacatggtattaaagtttagctaacttgagaaagatgtgttgttcgatatataatttttggtccaatattagaattttgtttgaaatagacggataaaagcattattttaaggagaacgtgttaaaaatttcacatatacacttcaatgctctacattatctttcttggttttctcggatcagcttacacgtcagctttttacatataaaatatcatcttttaatttgatgtaaacaagaagttcattaacagaatttcatatcttatttaccttatacaaataaatttcattaacaaaagaaattcatatacataaggaaaaacacagtgcataagcgactttgtctcataatcgttatctggcataggttagtctaccatgtggattcaagatttcgtatttgaatccattagttaaatcatatatagcccgttattggagactggagaccatatataagccgagatataatgatgttgggccggaataaacgggccaggtttgttataaaccacgccatatagtctatcaagactcgcgaggattacacgttagtacaaagagaagctaagaagaagatgcaaagaaaaccaagagaatagtcaaagacttaaaagcccatagaaacagagacatataatagttacacattgaccgttacacacaacgtaacatcccgttttctttatacagatacattgcacttgatttaatagttttccccatgacacatttttagcttcgagacaaacaactgtcgtttttatgttttttttgatatggtaagaatctgctttcacactatacagacaaaccacatatatagatgtgcacatatataagtacatgtaactggtgtttatttacatatatatcctagttcacggtgactatatttgtatatatatgtagtttgtatatgataacttaacaattaaagagagtctagtgacacctcaaagtggggaatgaaaggaatcccaattagaatagccaccggaaatacaagtatcaaaccgagaaatatcattatctccttcatgaacccatggaaatcctaacgacattgtagcttcttcccatattgaagaatcatccattaccggcaaatccacgtttatatgctcccatgatatctcctctgtcactcttccacatgatgacatctcgttggatgaacacggcgactcagagtcgctgctgctttttccaccggtgttgctgcttggtgtagtctgggacgccggagacgacgccgttttagggtaacttcttaaggactcagggaggttgagatgagcctcaggcccatagagcttacgagctgcggagtcataagccaaggcagcttcacgggaggtgtcgaaggtaccgagccaaagacgagctcctcggttaggctcgcggatctcagcgacccatttgccccaagtgcgttgtctaacacctttgtaagtgcaagacgcgttatcgggtccaccttttcctctcatacaacctttcctcgaactagcttggacggttcgttgtttcttattagcaccaaccatcattacttttggctctatggatgacatgtacggatgttgataactcgaaagtgatattatgtgacgacttttggtgagtgataaggcaaagacatgaggtaatggttaggtgtgtatatatactagaagagagtgatgaaacgtggcgaggagaagatatagctggcgcagacatgacggagggtcgtgtcgagaggaggaagctggtgttgtgtttgtaatcctaacacttgtctcgagagacccttctttttttggcaacagtaatcgtaaaaccagcagagagattgatgagtttgagatttttccaaaaaaaaaaagaaaagagagagagagatatggataaggtcatccgcgattggggaaatataaaaagatttatcactatgaattaatggctcgtcatgtgaatgcttctatctaatatcaagctatggctttattcatcagaaaacaaaatcaagctatggctttaacttaattataatttcaaatagctaaaaagaaagaaaaaaatacatgatttttcttatatatacaaacttttttaattaaaaagcctttagatttataaagcttttctctatgagtcatgtaatctctccttttgtaaaaaaagaatcatcatctaatgcataaacattgagaaagaattgtagttttttttttaattcgttcatagagtcaccattttctttcttgatgttatccatttctccaggctttttaattgccacgtgggaaattatagcaaagtacaagtatgaatgtgtgtaagggtcagtcatgtggcggcaatatgtccacgcaaattaaacgtacgggacccgaaggttcctcgataagagacaaacaaagttcactgaatcttacttctctgtcttagaacatttgtggccgagacacacgtgaaaaggcggcctttttaaccgataactacaaagctccggttccaatttatctaacttattttttgttctaaatattatctctagtattctcagatagaactttttaaaaatttgaagtcgttcaatgtcaagtagattattatggaaattgcaaaacataatttaccaaatcaatgtaattgcaactaaaatccattaatttgttttggatttttttttttttgaaaaaataaatttagcaagagaaatgaagatgatttatgtagatcgagaaaatagtgagatacttagtatgaattatcttgttcgattgggaatttgttatgatggatttgactccgatgtctgcttatataactttaacatatccacaatataaaaaatgttgaagatatgcaattaaacttatatttctagtactatattctgtgttgacagctaaaaaaacaaagctcttaatgcactaaattaattctctgtagaaaaatgcatttgaatggggatcatctgcgattccacactctgaggatgcaatccaggtgacacagcatgctgctagttatttagtcaggtaagaatgtaagatcaccctcatcaacgttttcacagttttcccaacaacattttttgttttctcaatggattgcggttgaatgtggtgcagtgaagctaggacgtcactgaacagacaccatctaagaaagtgctgagcaatctcatatacaactataagcctacttactacgcagggtaaagccactaaggacagtctttgcacaattctcttgtttttcgttgttgacaatgatgtcctttaacgatgtctttggatcatacaatcttgcaggaggggtttcgacgaggtttacatttttacacaaccaagatcccgtttctaagaagtttactcgttactcgtcgtcgtgtgtgtttgttttgtaactctgatttacatttagggagcctgcatgatttcccttgttgaatttatctttttggaattagatcatttcaaaagatacaactgtgtttgattcgtctttctagcaaataacttctgacttttgagattggttaccaaaacggcaaaaccgaagctttgtaaatgagtaatattaacgaagtttttattgcattgaaatttaacaatcacttagattatttgaaaatggtttttatttgaacttttcaaataccattttcataatcaaaaatataaagtaaagaaaaaaagtttacataataaaaatttttgtaacaaaaaccataaaagttaatgtaagagttaattttataacggactttcaggatgagacgtgatacttagttcagtttgttttcaattcattaaaattcaacatttagaaattttgaaaaccaaaatattttatgtaataaaaacttttacataatataaaatataattaaaaaataagttacataataaaaatattctaacaaaaatcataaaattaatctaagggttaaaaatttgattacgtgaaaagcggttgaactaataagacctcttacgacccatagaaacggacgagatgatgcttagtcaggtttgttttcaatgtattgaaattcaacattaaaccaaaatatttatagaataaaaactttagtgattaaaagtttttttttgtagacaaaacattttcataataaaaaatagaattaaaaaaaataagtttacataataaaaatatttgtaataaaaacaataaaaattaatctaaaggttaaatttacttgcataaaaagcggttgaactaataacacctcttaaggacccgttggatgggacgggatgcttagtccgatttgttttcaatgcattgaaattcaacacttagattttttgaaaaccaaaataatttatataaaaaaaactttagttgaaaaataagtttacataataaaactatttgtaaaaaccattaaaaataatctaagagataaatttacttgcgtaaaaaacggttgaactaataacacctcttacggacccgtataatgggacgggatgcttagtccgttttgttttcaatgcatttaaattcaacacttaaatttttgaataattaaaatattttttataataaaaactttagttaaaatttaaaaacatttttataatcaaaaatataataaaaaaataagtttacataataaaaatatttgtaacaaaaactgtaaaaattaatctaaggattaaatttacttgcgtgaaaggcggttggactaataacacctcttacggacccgtaagatgggacgggatgctcaatccggttgttttcaatgcattgaaatttaacacttacactttttaaaaccaaaatattttctacagtaaaatgttcaattaaaataaaataaaataaactttttctgacaaaaaaagaagagaaaaataaaaaaattgaggtaaaaaagataaaaaatcaagaggctaaatcactaaattccaaaatgatgaacaaaaataacattcgcctaaaggacataccagtaaacgaaacagtaggcaagaggctaaatccctaaattccaaattccaaattccaaatccctaaattttaaaattccaaaatttcaaatccctaaattccaaacaagaagctaaatccctatgttccaaattgatgaacaataacattcgcctaaaagacataacagtgaacgaaacagcagacaagtacatgatgaatttgcgtaaggatagaaagttataccaatttacgatcgagatcgaagcattctcgtgttatcaaacagtcacaagaaccctatacatgaagaacaaaaaaggatactaagtcccagcgatcaaaatcaaatctcaaaatcaatttaaagtaagaaatatctcttaccatagacataaaattaaaggatcaaggagaatcttcgtccttacttgcttgaatccgagaagaatcactccctgcgagtctgtgacacgcaaaaatcagaaaaacagagtcacacgacaatgaaaagagaatcgatgaaccctagaagaccctaatatatacaattacaaatcatggataacataatgaaacagaaatagataaaaataaaagagagagagaacgactacaactaagtaacctgatcgtagatagatgactctctcaggttgagattggtgatcctttagtcgatcggaatcataagtgtaatgaaagaattagagagaatgaagaagacggacaacaagtttaaaagattgtagtttgcagttaaagttaatcttaatctgggggagaaactctcgtctccgcataaataacaggagcgtgggaaaaaaaaaggaaatcactataacggctacttatgaaaaaaatggaaattaataataggaaccgactttaatttcataaagacgcttttgcccttccatcgttgacgtcattgtttcttcttcttctctcctccatttgaaaacgcaaacttggaaagggaaactggtttgttctcagatagtgaagacatatatctctagtatactctctcagatagaacttttaaaaaatttgaagtcgttcaacgtcaaatagattattatggaaattgcaaaacataatttaccaaatcaatgtaattgcaactaaaatccattaaattttttttttagcaagagaataatgtaattgtagataacaaaagaaagtcaaagctgctgttataatcaacgttgtaacagatgattaaaaaacaatcaacaagattctgaatgtcttggaaaaagtcgttattagccacaaacatttcatgaaattgttatgagaaagaatttaattaagattttttttttcaagaaaaatccaaatttcaaaatttgattagcttgtggattggtcatcatcgtcgctcttctctttgtgaataatatagatataacacgagacgctaagagcagctgcgcctaaggcgattcctctgaagacatcgaaatgatcgtgcgtgttatataaaaaagccactagaagcgacacgatcggccacgtacagacactgatcacgttcgagaacacggcggagacagcgaacactagccccacgatcccgacccagtagatctgccatgcaacggcttgacccaccatagtcctcacgtaggcaatatctcccttcgtgaacgtttccatctctttcttcatatcgtgatgttcaccagagattaaaacggctgcgactaagatgatggttacgacgagagacaagaagatgatcatctcgagaacgacaacgaaactgggttgttttctgttggtggatgtgttgcagaaagagataagttcctcgaacaccttcctgataatgcagaggagcaaggagaaaaagatggcagcgccgaaagccacattaataattccatagccgtaggatttcttcccgtagatgggtgacccggcggagaaagtgtagagagtgaaagcgccggcgaggacggctaagatgagagagataaacgtccatctattaaatttgatatcgttgtaatacttggagaaaatcagggtgaataatagctgcgtcgtgtaagtgagagtgaaaactctatagggtatctggtttctaacgtcggagaaaaatgcttgacaaaacatgtagatgcagagaatagagtaagttatggctaagtgcttgagggaggtttcaccggagaaaatgagaagttgtttctgtttcttgatgaggaagtggagaaggaaagggagaaggaggatggggaatccgacgacttggagaagtgtttgagtcaagataccgcggcggcggctcaggtttttgtggaggaagtaatagttctcgaggagtctagcgatgcattgacctgttacggccaagatggtgcatatgatgatggtaacccactggttacgtctctgattcgagtcacttgttaggctgatcggtgtggttaggcggtgctcgatatccagggctatttgcacaaagtgttctgtaaaggaaaacaatattatgattggcataccaatatatatatgtgacaagggaatataatgagacagaacataggcctaccttgtggatttgacgactgcattggttgattatgtcccatcatatttcttgagttctgggaatctaggaaactggcgtttgtgtgtttatagccaaacgcaatgggtctgagggtggactttgacggagtaagggttttgcctagttgagcaaatgggttttagttacttatatgcagacatattcctagaagtaaaagaccaagtacagattaaatgactttgtcatttgacactagataataaagaaaaagacaagcatcatactgcttttgcttgttctatttttttttatagaagtagtcaacttccaaagttttggaattc

SEQ ID NO: 136 - DNA, 97208 bp, Arabidopsis thaliana
aagctttttaatagattcatctcttcttatcaatttaagtagtttttgataaacctttttttggggtgataattatatagcagaaatagcaggattttgtaacgaatatgcaaccaagtttccaatgttttggttgtctatactataaactgaaaggattctaagaatcgtttttttgaatactatgaaataaaaggctaaagagggagatacgtggacagactctttattataaaggcaatgagaagaaaagaagaaactaagttgcaaaatacaataagagagaaccacaaagataaagtaacaaacaaacaaacacatttcccagattcttcaacttgatacatgtatatatatatatagtggtaatagtaggaatagagatttcaataaaagagatagagatgtgacttctgtgttttttcatcttttggtttgtgttgtaagatcaagattcgtaaacttgttcttcttcttcatcatattcgtcttcttcatcagcggtagcatcttggtattgttggtattcagagaccagatcattcatgttgctctctgcttcagtgaactccatctcgtccattccttctcctgtgtaccaatgcaagaaagctttacgcctgaacatagccgtgaactgttcgcttactctcctgaacatttcctggatcgaagtcgagtttccgacaaacgtggaagccattttgattccagttggtggaatgtcgcagacgctggacttcacattgtttgggatccattcaacaaagtaggatgagttcttgttctggacatttaggatctgttcgtccacttcctttgtgctcatttttcctcggaacatggctgaagctgtgaggtaacgtccgtggcgtggatcagctgcacacatcatgttcttagcgtcccacatttgctgtgtcagctccgggactgtgagagagatgtactgttgagagccacgggaagtgagaggggcgaaaccaaccatgaagaaatgtagacgagggaatgggataaggttcacggcgagtttcctaaggtcagagttgagttgtccagggaatcttaaagagcaagtcacaccactcatagttgcggagatcaagtggttcaagtctccaactgcaaaatgtatatatatatatgaactcttagaatttaggaaccaagaaaacaaagtaacaaacattaaggttttgatggtacttacagctaggagtgctgagtttgagagtgcggaaacagatatcgtaaagagcttcgttgtcgaggaccatgcattcatcagcattctctacaagttggtggactgagagagttgcattgtacggctcaacgactgtgtctgagacctttggagatgggaaaacagagaatgtgagcatcattctgtctgggtattcctcacggatctttgatatcaagagagttcccattcctgaacccgtgcctcctccaagagagtgacatacttgaaaccctgtaatacagaaatgttaagaacaagtgtgaaacaatgtactacaaaactaaagaagtcccttatacctaaaccagatccaaaaagtattgagatgttatttaacaattgctgaaaccaatcatgacccacttgcttattcaattatatccccacaaagtgatatgtttcacctcgaaagtgtcaacacaagagtattccctaaagttcttattataaaattcgatatggttttaaggtttcacgtgatattgttgatccacagtcacaaatctggaacaaaacattaggggacactaatacactaccgccaaattaggatattgtccttagtttcaatgatgttaactttttactataaagaatagacaaaatctaaatcctagccaatcattaagtgttaacagctcactcttaaacagtaatcaacaggagagaaacaccataaaaacgcaaatcaaacacaagaacatcgacggatcatgttcatgtaattcataaactgtaattggaaccatgaccatgaagagatcaatgaagagaaacgttaatcaaatatcaaaacacgatatgtgagagattcactagtgcaatgcgaagatgatcaaaaatcaaactgaaatcgaaatcatcggttactaaatatgcaactacattaacactcacgagacgagatttaaatgatcgaaaccatcggataattgcagttttgattcacaaatcaatcagataatatgatcaaagcaccagcagattcataaatcaaaagggagaaatcgattcatatatataccttgaaggcaatcacagttctcagcttccttacgaacaacatcgagaacagcatcaataagttcagcaccttcagtataatgacctttcgcccaattatttccggcaccggattgaccaaagacgaagttatcaggacggaaaatctgaccgtagggaccagatctgatactatccatagtaccaggctcgagatccatgagaacagcacgaggaacgtaacgaccaccagaagcttcattgtaataaacattgatacgttcgagctgaagatcggcggaatcaccgttgtaacgtccggtgggatcaacgccgtgttcgtcgcagataacttcccagaatttggaaccgatttggttaccgcattggccgccttggacgtggaggatttctctcatgatgatgatgatcgatgaagattttgggatctggagatggtgaaggagaagaaggaggagaataagaagggagagggagagagagaggcgggagagttttttttgggaagtagtgacaaaatttgacagcgtggggaagatgggatctttgccagctttaaccgtttgttcgttttttatcctctgttttttttactatactctctttttaaaaaaatgtttttttttaccatttgacttttttgctgcaaacaaaaatgtcacatattgttgttagcaccgtcaaattgaaatttctacaaagtgaatgattaatgttatttaagatattgttgaattatatcgtccatttaactatttaagtgtgatagctttcaagtatcgatcattcattctagtttcaaatcttgatccatttgatgaatcttttactattcgaatttcatcacgactagctacaaccacccttgattatatgttatgacttctgaaaacatcgagaaacaaaaattcaataatagtgcgtagaagaagacgatcaatgcgtaatgaatacagtaactttgcatgtagtatcttagttgttttagtgacatagcacatgtagcaagacgtaataaacgatctggagatcttgaatgcatatgtacctatttctatgtaaacgatcaaacacaataattgaaatcggttgaatgatcaaaagtatagaaaaatatcatcacactgattgtgtttggatcttttatacaatattgatgataacatgaaaaacaaataatgccatagcacatgtagctaggtagatgtagactgtagtaagatctgagatttgatccaattattttttcatttttatttatgtcatggtcgatctactgtttatacgtaacgtcaaaatcaataattgaacttgtaaaaggatcctatattttttaaaatatatatttgttcttggtaaattacttgctcccaacttattgtgaaaacgtatgtcactcaagggaacatagaggaaatgggagcacgttagctgttcgtatgtggctacaatatcttcttatagagcacgttagcactcaccaagtcaaaacagacctgggccggtttgcagataacaactgtgtgagcccattaaaatctaaaacggcatcgtctagtagtctttagtcgcaatcaaaccacaaaccctaagatcatctctttaaattaccatccgtcttctgcaattacacaagtgattcgaatcgcaatcaaaccacaaaccctaagatcaacacagatcctaatactctctgatcattcctttaaaccgttctttagttttgctaattaaaatagacttttctaggttttattatttcagacaattaattattatcgaactttgccacaacggatgacatttcccggtatcggattttcatctctaaccggaatagtcgaaggatcttcttctccttcacctttaactctcatataaagctcttgaccaagataccattgctctgctttctgtgatctcacgttccacattccttgattatccatagctatcaatattgctgtccacgaatatggataaacctaaacacacacagaatcaattaaccaaaactaatcactggtttaatactttaaattacgagattagatatggcttaacctgaactgttgaccgtgaaacagcatctactaagttatatccagcttttttgctttcagaccaagctccaaatccatatctaacattaaactcaaataaaattagtacacctaatttaatcatcatacacataattatgatttaaatattgtaatttttacccgacaacgaagaaattgtaaccatcgatgtgataactctccaatccaaatagagggttctggaacacgatgtggatgaaatctttgtaatgaatatcgaccactgaagttccaagagtcggtgttttgttggatggataaaccgggaacatgccagggattatcgtgtcatttagctgaaaatgatcaacgagctttaacggagtctcggggtagacaaacgaaacgccgttaatcgtataccgtagtttgcccgacgataacataacgtcgttatgtaatattatcgttctggttacgtttattcgtccatagtggtacgaaccttgagggttcgatcttgctgctccaacgttcaggtccattctgtgtcgtacacttaacgtttattagtcaagaacaaatactaaacgaaatatttcatataaaagtttttattctttggtataaaaaaagagtatttctttacctaatggaaagggcttgttcaactgaggaaccaaaatcttgcaaagcaggtgcgagtggaccttgtccgactgggtcaagtggggaaccgggatatcgaattaaagctataccgccaaggtaggaatcagtgaaccgagctgtggcgaatatgtagtaagaccggtaaattccaaccgggtcggttttggcagtgacaagaatagagtatgattggcctacgtggatgtccaggctcgagtaaacacgtttttgaacatacgtaccctctgtctcaactagaagcatatcgtggtcttggattctgaagtttaagcatgttttgagacccacgtttgatattcttagcctatatgttttgcctgtgattatatatagacaacataaaaagaacatttgtgtgtaaactacattattaaagatataatgtaatatttttaaaagaagaaaaaaactcacctggttcaaatgcaaagaaggtctcttcagggccacgcccgttaaaaagaataccatcaggatttggcaaactgtgaccagcgtcaagtgaagctctcataaccttacaccaaaatttggaaaccaagtgttaattatgcaaatcaagcaaaacatcttttacaatgaaactaataacacattcaataaatgggcaagataaaactcaataaccaaaatgattatgatctacaaaattagtttttttatatataaaaaggatagtattggaatgtaggtttgatgataatacggtaatttatcaaagaaacatactgtatggtcgagataaaaccaatctccaatcaagatgtcgtattcttcgtcgggcttagggaatgggactgggacaagttctgggggatagattctaatagcaccgtatcctccggcagctttctgaagtagaagggtcggaaaataaaagtaacttccaatttgatccttcacctgaaaacggtacgtccaatttgtccccggtagtatgggacagtttgtccctcgaactccatcttgccacgagttcttccgcaattgcaatccattcctttaatttacatagaggtttaataacaattattcctaaaattaacccaaaacaaaaagttgaaaatatataccaagtcatgaggaagggttcgggcaaattgttgaaaatgttaacgacaatgatatcgtttgctgttgcattaaggatcggtccagggaacatgtcgttgatcactataacctatagattttttttttggtgaatactataacctatagattgatcatgcatctgaaatttcatataagatagctaaaaccatattattgtaacaaataaaaacatattcaaatgaaaatggttacctgcttgttgcctccaagaatgaaacgttgagaatacgagacgacccattgatacgatgagattggtgcaaacgcatagctcaactccaagatgaccaaagagatcagaaccaacacctcgacaaagacatgtctcatcgcgaaaagagtgatttaagaaattttaagatgcttgtgatgtgaaaaagaggtgttagaggcaagacgtagctacatatttttctttggaacaatatattaattagacgacaactattgttactctgtttggagttaacgtttgttttgtgctatgttttttgaatatgatcgaaaagttcatgcaatctgcatttccaacctaatttatgggcagcacatttgtgcttttgttaaaatttgctgggcttattcattatactaaaccatgcataaaggcccattaaatatcttattgtaatgtgacggacgaaaaaaaaaacgtgagggaggacgatggcaattgcttacgatatattgtaaagtggatgtgacctgtctgtctacacaatattacaaagatggtcgctattactcctacaaaaaataatacaacgcaaaacaattattgaaaaattattcatcacttttgtatctttcaaactttcacagttcacaccacctaaaaaacagtaaaaagtaacaacattatcactttccacaacaaaatatctaacaactttgagtatacagaaatgtacatagtacatacgtataagcaaaatgaattttgtttctccttttttttcctggtgtatatcgttgcaaacttgcaattgatcaataaaacgcaaagatattatattgaacaaataaataatttttatatagccaagatattatatggatcctcattcctcaaatataataatttacatggcccgcgattatcatgaaagacgttgaaacgtccactaatcgtacctagttgttctgaaaatgaaatgatgattttataaatgatatggttttagacttttgaagttcttcatcacttattgttagatgaaacaacaacgttgcattcaaatctcaaattcctataaatcacagataaaaaagtaattttgttttacacgtctacgtggttacaaatcctaatcacgtaactaaacagtaaagttaaagaatcttgaaaaataaagatctactttacgttttgtagatatttttaattaaaagtgaacgtcaaaaggtaattggatattttcgttaaaatgttatcaatcaaactcggacaacaattagtggtaatttaactatttaaaaaccagactaacccattatcgtatagtgctaattatgaactatgaaccgattaaacaacaaaatttactatataaaatcatcaggtgcttttcttaatctcaacggttaaaaaaaataaccaattagatgtgtccacgtaagcaggcgtaccataagctaccaaccaacacatacaccagattctcaccaacagaggaaaaaagcttctactataaagcacacatcttcttcttcatctctctttcgctctcagaatcctcttttaagtctctgtttcataaataaaactaataaagaagaagaagaaaacagagcaattaaagtccttaaatcttcttcttctccaattcaatggctcttccgttgccattgatcttccttatcttctctcatttgttcgtttctggtacgaatcttctcctatagatcaactttagttatgattaataatactgtgattctgatgattttatggttttataaacaggagttagatcaacgagcttcattatggtgaacaaatgcgaatacacagtctggcctggacttttatcaaacgccggagttccaccacttccgacgaccggattcgttctccaaaaaggcgaagaacgaacaatcagcgctccaacttcatggggaggaagattctgggggagaactcaatgttccaccgacaccgacggaaaattcacttgtctcaccggagattgcggatctggtaccctcgaatgctccggatccggagcaacaccaccagcaacactagcggaattcacactagacggatctaacggactcgatttctacgacgttagtctcgtcgacggttacaacgtcccgatgctagtggctccacaaggaggctcgggtttaaactgtagcagcaccggatgcgttgtagatctgaacggttcgtgtccgtcggagcttaaagtgacgagtttagacggcagaggtaaacaatccatgggatgtaaaagcgcgtgtgaagcttttcgtacgccggagtattgttgcagcggcgcccacggtacacctgacacgtgtaaaccgtcgtcgtactcgttgatgtttaaaactgcgtgtccacgtgcttacagctacgcttacgatgatcagagtagtaccttcacatgtgctgaatctcctaattacgttatcacgttttgccctactcctaacaccaggtgattattccatttatacccttttataactattaacacaccttgcctatgagggtagttttgtcaatatagaatgtatcttcttcactgttgcaccaaattagcatggatagtagtttatgattatggttattttcgtcaattactgcagacaccatatttactaaccattaattaccttttgcttaccgtgcaattgaagtaacgcttaattatagctagaaataaattactccgaatctatagaattttgctttatactgcaaaaagaaaaatttgtttatttacgattttttttctttttttcttatcaatttgtttgatagtcccaatttaccctcgaatatgaagatagatttattgggatgtggatcgttaacggctcatcgagatatttttttatatgatctctaatctcgaggggacgcgtggcagaatcacgtacacatttactaagcggctatgtttttttttgtttgttgcagtcaaaaatcatctcaagatcagagcccagatcccaaaccgacgacaccaaccgggacgtcgtcgacaactcctgccggagatagtagtacgacgtggtcaccggtagatacatcaatgatatacgaaggagctttggatcaaaacaaaggatcaccgtccacgtgtcatctttcgttatgtggaatcacagtcacacttgcgctggccttttgtcggatgtggcggctcttttgacacctaactttgtctcccgcgtaaaacactgaagaatgtgggccctcactgacgaaagccttatctcgttccggcccatgtgaaccggttattcccgaacgacgtcggattgggtcagagttgagaaaaaaagttaacaacaccctacagttacgaaaatatccttcattcatgttcatgggagaattcttaatttgggtgaggaacacgtgggcaagaaagtgggctgctggtggagttcataaaagatgggaatgtttaattgtaaggtcagaatatttatttgatttataatgtaactaggattagaagaatattatgtacactatataaagcagtaatctatttagtttaaagctatatattggaaactattggtgggaatatttcatttaattgttatctgctgatgctgcgttggccattcggaacattgaaatgaataatactaatattcatttcatggtcttgtcccaactactgtatttaataataatttgactttacaagccgcatatgagagccataagaaattctctattataagtttcaaaagttaaatggacctacacagtaatagtgataccactagctgaaaaaagattaaagagataatcttaattaagtgtgagttgatgacgatgcctttgatttacagtgggagtaaacctataaatataaaccaagtgtctgtttcactgcatatgatttgccaaaaaaatatcataagattaaagccatcatggaatatgatgaagacatgccataatatctcataggaaacacaccactattcaaattagaagaactcttaatagttaataccaagatgggtctaatactggagcccattactgattttagaggcccgttagaaacaattactaagtccaaagagcatttatttttgagtacgacgatcaaattttgaccacagacataaatagagcctcttgaggactttgaggaccttgacaacgacatgcgtgagaatgtcatacacccataaatgtagtgcgtggcaagtctgaccaaatcccgaaacggtgacgttttacgggaagggtacttttaccaaactcttctcgcattagtgatgagccatagagaggaagcaaaagatcttgtcaagggtgttttagtaatttcaaaatatccttcccttcgttgacaaggatgacgtctttttgagtatttcaacatccaccacaatttcgcttttctccactttttctgttaaaaagcttcctccaccgcaacgaatttcacggcgacggtgaagaagaagtaaagtcctagatgtgtctcatggcgttatccgacgcggttctcgggaatctcgcgacgatctacgtggcggtgattatcgcgattaaagcctacggattaatcaccgggaggagtttcagcgctggattcgtcgtcgtcgtttcgattacggcagttggtgttttgcttgcagttacgcttgcttgggatgtgtctcgtagagcagcggaggcggtttctcggtacaatcgtgttggtggtgaggaagatcttagccaccaccgtcaccatcacgacggtggtgcgatttgtaaaggagggatttgctggcacggcgttgcggttcggtctccggcttcacaggttcgatttaggcttccacaacatataccttacggtgctttctgagtatataaacttcgaattttccctctttattttgacttttgtgaagtagataacatgtgttagatatatacgtttctcatagattttctgtgtaatagatgatgatgaggaataaggtaatggtgttcttcttcttgtaagttggaaggtttttgtttgtattgatatgttgtaaaatcggatagtgattgtgatgattatagatatgatgttcttgtttttaaaagtaaaaatggattttgaatttaagagctgcactgttatccaaatttgaatgttgatactcgagtcttaccactgaatgaggattgtggcattgagaattttgggggattcttaatgaagagactaaaacagagtaatctaaataacatgtgttcggagttaaggaataaggtaatgatgttcttcttcgtgtaagctgggaggtttttgtttgtattgatatgttgtaaaatcggatagtgattatgatgatgatagatgttcttgttttctttatacaatcgattttgaattttgagagctgcagtgttgtttaaatctgaatgaaactcaggtctttccaagttaatcaagattgtggccttgaaagttttgtgatttaaattgtatatgattcttaatgaagagactaaaacagagtaatgaaggatcttgtttctctaccttaatgaatttgtgactaatttgccttgtcttcttctcacacccgtttataagttgtgactatgtgccttgtcttcttctctgaattgctctatgaatggaggtaagagttatggatagaattagcttcacagcatcatcctcatcttgtgggaaaatgcacattatagaggttgaattctgttgttcatgaacttttaaagcttcttggttgttgatttctgtgaatttttccggtttcttagtttatgtgtgttttgcttcaagagcagaaactacaatgttatgaccctgaggtgattttcttagctcgtaaaaatatgagaagtgaatgacccccaagaactcaatgaaactggtcattattccaaatgcagagtacgagtccaatctcttaatcaaccattagtctgttgattccgtgtttttttttatcagatgtgtttcctttttattttccgagccatctgctggtaaatactttgtaagtaaggtcaagattgcaacatgacactgtcggaagctaacacaaacctgaatttagatatgaccctaattcacatattctaaacagtctagacttaaatccagaggtcaaagctctcacattcttttattttatacactctgaacggagaattagctaaagtttaaagccatcaagcaataagcatattgattacattacatactcgagataataacacataaagaggtaatatacaaattgaaacacaacaaatatacaaacccgaaagtattagaaaccataaataagaacacccaaaaaatgatcaccacatttcgcatcttattttcatatttatcttgcttgggtcagaacgcgatcaagttcgccacggatttaggagggttagtgagcatgtgcacaacttccctcatcgtaggccttgccgcggcttcttcctccacacacatcattgcgatcttgaacacatgaatcacacttgtcaacgggtaaccagtcaacctcgggtcaacaatcgcaacaacaatagcagcatccgatggctgagttatctcctcttccgtgttcctcacccacctaactatatccactccttctccaaattcaccaacaggtttcttcccagctattaactccaacaaaaccactccgaaactatacacatcactcttctcgtccactttcaaggtatatgcatactctatgcaaaccaaaaacaaaatgataatcagaacatatatcattttggtgagtactaatgttgttgacatgtaactaacctggggcgatgtatccataagagccagcaattgaagacatacactcagaagcagcaccatcaactaagaacttagcaagcccaaaatcagcaacatgggcttcaaaatcagagtccaaaagaatgttattggacttaacatctctatgcaagatcaatggtgaacaatcatggtgaagataacacaagccctttgcagcttccacggctactctatgtctcgtctcccattgaagatgaccacctttagatccatgcaaaagctctccaaggcttccattaggcatgtactcataaagaaggagattcgtatccttgttcgctacgtaaccaagaagtctcactatgtgacggtggcggattctccccaaagtttgaatctccgccgtgaatccatgatcgctcctcccggtcccacggccaacgagtcgtttaatcgcgacgtctacgttgtttggcattgatccacggtagacaattccagctccgcctttaccgattatgttctcttctttaagacactcgagaacgtcttcagatttgaaatctagtttctggaaggcggttagtttccaggcgagagatttctggttcttcttcttattcatctgacgaatcgctacactgattaggatcaaaccggtgatcgctgcgataaccgtgattacgatccttgacggtgagaacaacgccgtgtgattgtgatcggaggtttgtcctggccgtgttggacaagagacacggtgagggagacagaggtaagtgtttccggcgaaggaagtttcgttgaacaccaagaattgaccaccgagtggtactctaccggagagatcgttgaaagagagatcgagagttgttaaactcgtcatgtttccgattccggtagggattgaaccggttaattgattaccggagatatttagagttcctaagtttttcacgttgttgatccctttagggatttctccgttgattcggttacggctgagatcgacggagattaaagttgagcagcgagagattgaatctggaataccgccggtgatgttgttcgcacttgtgttgatcctcgataaatgcttcaattcgaagatttctctcggaatgttgccgcgaaatcggttccgatctaagaatagagtctgtagattggggaaattaccaatcgcaggtggaatctcgccggaaaaccagttgttagagaggtaaatctgatcgagaacatcgccggacatcgttaccggaagttcaccggagaagaaattatcagtgagttcgataatcgtaactaacggtagattgaaaagccccgccggaacagtgccgttgagaagattcttaacgattctgattttggttaaggatttgcatttaccaagctcttctggaattggaccaaagaagaagttgttagagagaattaacatctctaatttctcacctctgcataagtccttggggataagtccggtgagatgattatcagagacatcaagctttattagattcccgttccggccaagattcgccggtaattgtaacgtgaaattgttctcccatacttcgaagacttcgagttttggtaattctccgatggcctctggtatttgtccgtagagattgtttctgaagagattgattagagtaatgtttccgagattgatgaagctttgagggatttctccggttaactgattgattgataaatcgagagatttcaagctgactaaaccggaaagctccggtggtatatgaccggttaagttgttgatgtgaagaaacagagtatgtagatgtttcaggttacttaaactcgtcggaatctctccggtgagtgtacagctcgccatgtcgaggatctcaagctttgttaaaccaccgaactccggtggaacaccaccggtgtagctgttgtagtagccaatatacatttctcttaagttcttgaggcgggaaagaaacgccggagatttaccggagagtccagctccgttgagaccaagatactctaagctttgaatatctccataactctctggaatctctccgctgaagaaatttccaccgaaagagaggtatttaagcttcttaagctctgacatctccggtggtaacttaccgttgaaattgttgttataagtgtcaagaacttcaagatcaaccatagcttttaaaatctctccagggaatgttccagtaaggttaccattgttggagatattcaaaaccttgagagaagttagactcttcatctccaatggtaattcaccggtgaagttgttggcagctaaagttagattcaccaaatgagtcaacatcccaatctctggtgagattgtaccaaacaaaggagtgaaggagacgttgagagagataacacgagcatcgtcgtcacatgagacgccggagaaagaacagtgagcatccggagaagatgagtgaatccagtcgtggagaccgtgtcctttaggaccaatcatggaggatttgagattgagaagaacttccatgtcagtgtaagcgaaacatggtgagaaaaatagatacagatgcagaaacagaagatgagtcttcaaaagtctcatcgccatttttttagtgtcctctcagtgagaaagagcgagagaaaataataagatagcgtgagtgttatgcgataggacacagagacatgaacaatggcatattatgaagaagaagatgaagagaatcgatgtggtactactgttctaaataccgtaagactttgtgagcgaatatatacttttatgtgactttacataaatattgttattattaaaaataatgcgccaaaatacttttatgtgttcatttttcaaattatcttgtaaatcttgttatggttactgtcttaagtagatttatcatttgtgaatagagaaattttacgaaaataaaagataattaaggtacaattgatcagagaaccatctgctgatcttgcaggtagatagatacaaactatacgacttatggtcaaacacatacgtctcagtctctcattggctatttttacattcgattcttttataacgagtgatcaataatattgctgagattgtactttcaaatttggtcacacactattcaaactctaaaatcactggaattacactagaaaggcagttttactggagtcaaactttagagtttttagtagccgccactactacacttattagacatggagaaacgggaacgtcgtcgttttcttcttctctgataagtcttctgacacgatttgttttggcttcatcaaacaaaaatcaatagataagaggttcacggcgttttaaatttaacggtgtagagatgcatctcttctttaacattgacagatctttatctaaacggcgttgatctgaccgttataaatgctatagacaggacataacgttacgttccctagagcctgtggtttcttctttctttcttctgtcgccgtcttgtcaacggcaccagttatataatccgacggcgtttatagcatcgtcgtcacgtgatggggagaaaagaggaataagaagacaaggagagaagtaaatgggctttaattagaagtagggcctatttttctaattggcccgtatagaaagtctgtctgtgtccttttcctaaagagacaaatttgccccttgtggtttttttggctttaacttccaagtcaacgctctttcttgtattttgtcttctcacttctcgttcattcatacactccactcaccggtctgtcaccatacagaccttctgcttcaaggtccccacgctctatgttcatattttacctttgtttcgttcgtgtgactctcttgaaaacattagggatttattcacttcggtccatttaagatttgatcgtgattagtccaaagtccaaaccgatcaaattaatagcaactgccgataccaaattatattcgttttgtaatcggtgattcagaaaaaagttcaatgtatataaattcgttcgtagtgttgatattaggacaaatcactagtttgaaactaaagatactaaaaactatttaatgtttgaagttttaggtttagttgttaatacttttggctgaaaacgtgtcaattttgttgttaatgatggcaaaacgaatagcaaaatattcctaatgaattaggccgaatgatatgattaatatgcttaacttacataagtgaatctttcttaattataagtaagcaccttaaagcagtttttacaagatcgattctgccacaatcaaaatcgattctatcaacaatctaacaataaaataataatagttgtgaattaatggtctgccgttatacaagcactatggttcttggcgaatatatcttcatcccgctaacaatttttttagtttgatagaaaaatatatcaggtgctttagcaacaaaaagggattttaatctttaaagaaatctatacacttggggttgacatacacttggggaccaatgttctattattattgcggtatattggtataaaggtccttcctaaatggcagcgaatttctcatattaataatcttttgtgcattctcttttagatattatcttatgatatacattagattaagaagtaaacgctgaaaaatatgcatacttagcaacaaataaatgtgcttttttctcgtgtctatttggtttaacttaagtggattgagaatcagatcaacaggtacaagtgcaacctttaaaacaatgagatgtcaattagtgatgaagaagagagcatctcttatgtgattcgctgaaaatgctctaactcaatgaactttgggaataaaggtttaggttctcttcagcagaaaaggagctctttttagtaagtgggaaattttattattgtaaaaaagaatctctaaactttggattattttctgatgtaaatagtataatatacatataggagaataatataacgacatatagcaacgatggaaaatttatcaccaaaaatcatgtcatctttatcactaaatgactcaagggtgaaagaactttggaccaatttctagatggatatcaataaatttgttgaaattaaattatacgaaagggaattaaactgtagaagcttggttcacatgtttgattttcacaaaaatgtttcgatttgaacttgccatagtacaatttgcaacatatgcttcttttactctgttgtttgcgttataataaaatcgtctcaaaatatttaaaaatcatatgcaatttgatttaagaataaatttggaactgtttagaaagttaggtacccaattcatatacttattaaatacaataaataaatcataaagttttatatacagatgcaccaattgtttatagattatctgtatacacaattacacactctactaatcaatgtactttagcatagaataatacttttacttctactaagcttgtttcactaattataatgtttagttagagataaaaccattgaaaaatctcaaaaagtaataatcaatataaacaaatagagagagcaatgataataataagatatataggtcatagtcttgtcaatcatgttaatgataaaaacgacaaggctacaaaagtagtagtagaagtagaagaagaagatgatgatagtgaagacaaacttgtgtcataagtggtcttacacaaatccgtcttggaaactggtgtttgcctaatggccctgctgggcttttgcttcagtcattaccgaatcctcttgtattggcagctttaatcccaaatctattcaactcatgcaatgattttggacgaagaaacttctcaatcccaaatgacccttacttcacctttcactttttgttccatcgtaaagatttgaaactttttagatcttatgaaaaggcaccacatcttcatcaagtattttctttaaaatgtaggggaaaaaaaaatctagttcttttgttcatagtcaacctggaccagtaggtcgttgggccttgggtcttcagtcacgtcggcaatcaacattcacttacccatttgaaacattggatcagcgtgaccaatgccaacccattaatctaaatggtttaaacaatcaagcgtgcaaggataaatgcattggacttgagagaacaagatatggaatttgaaatgttgccttaccagttaacaagtgtctctgtttcctcccaagttaatgtaccaaaactctttggtgcttaattgtgggggcttttataatattgggtacattttgggccataaattagagaaagagcacattatgattgagtttatgaagataggcagtttttgggaaataaattgacgaaattgcccctgcgatttcactcattctcctaaattgtttttgcagaatcttttcctgaattgtttttgcagagcctcatattggatcgattcctaacttgtttcaatggatgatgtattaagtacagagattgattatcctatttctctacttaatcaatgtttctttctacaagacaatatatacacaaaagatgtatttacggaaacaaaatcgatagagacaaaaattagaaaatctgttaataacatttcatcaccatccaattcagataaaccccaataaaatcagttaaaagctttttgatggaagaaagctaacccctaagaaaatattatataacgaacccaaatatactaatcttaaataattggaatcgattaaaattttcaattatttcttatccctctttgaaattgaagaaagagaggatgaaattaattcagatcaaacaattcaaattcaaaaaagctatggaggattaccacctgcatcgtcgaggaagaagattggccaggcatagatctgaattttgtaaggtgatggagaagcaatggacatcaatggtgagtttagaggcaatagattccatgccattagagaaagagaaagagagagaaataatcgcacatttctgagatcgattgatattgatgaattctcctcaattagattgaaggtacaaggagaagaaactcaattagattgaaggataaaacagtcatccatataatataaaagtatctaaatttgtaaggaacatgagatgttcctatatctacaaaagcacagactttaatatgctaatcccataattgatcccttaattgtgtgtgtattcaaaataagcccacttcttataggcaatgtaacacttgactcaaaagccaaagcagccacttaaatagttaagttacattaaacagagaagcagccttccctaagttaagcattcttaatctaaccaaatataattcatatctaacaatgttaacttctctttctattcttaataataacctaacaaattaacttgggtggtgtactattctgagtttgttacttgtcttgtccatgcacggctagtgctggtgctgtcttagaagggcttgaaggtacgtggctgttgatacagaaaatgtttaaagaggagacaagtctttgtcaaagtttgcggatgacggctatgaaatcgaaaacgaattttctttcagtttttcttaaaaatttttttttaccttaaaacaataagttaaataaataaaattaaatcggatttatcttctcggtcgtccgaaaatggcagagttgaatccaagaagttttgtgtgggagttgaggtgggaactacgaaattaaatataatctatgcgctattttacaaatttgttagtccaaatccactatgttgctaatatttaattacatgtttagatcctaattagtttgatgattatataatcaataccaaagaaagtgaagaaataacctaatttatcaacttgccagctagtgaagtagctccttggaggtttcagtaaaaaataataaaagtcgataaaaaaatactacccaacttcatggtttattattaaatgcgatgtggtcgagacaaagtaccacttgagtaccgtactaggatatgctcaacatatttaaaattttgaccaagtcaaattaaccagccagagatgttaacagttaatgtagtagccaccggtccaatgaaattgcaaatgaacaaacgtagcacctgaaaactcgccaccgatcacgatcagcacactttttatgaattggtcaagatattatcttctatcattagatgaatacttgcatgttagtattctctactatcagacggtgtgtatttttttatttatagggttgaacgctttattgtcccatgcacacgtaaaagtcgacctccccatcattttttcactataaatagtggttgatttcaagcagatttcttcaaactaaaacatatatacatcgaaaacaactaagtataaacaatagtcatggctaagtctgctaccatcgttactcttttcttcgctgctcttgttttctttgctgctcttggtgagtaatgatgttatcgtataccatatgcatggaaaattgagttttaaccttttttctttcattttattgtgataattaactgtgagagatatatctatatgcagaagcaccgatggtggtggaagcacagaagttgtgcgagaggccaagtgggacatggtccggagtttgcggaaacagtaacgcgtgcaagaatcagtgcattaaccttgagaaagcacgacatggatcttgcaactatgtcttcccagctcacaaatgtatctgctacttcccatgttaatctaccaagagctcttaatgcttaattataaagtgtgtatttctattaaataagtatgtgtcactctatgagaggtcttatgacatgtaccagatatgttatgttgctttgttttaataagataaacttttacgtacgacgtatactactgtttcttcttgtccatatttgtctgcaaaactccaacacaacacaaacgattatttgaaaatagagaatcggaggaatatgttatagtatttcataaaaactgcttataataaagagtattcagcttatacataaaagagagctagctacataacacaatctccgacttaattatataccaaagagatttacctagctaattcaactttaaaaaacgaggtcttgtgttgacatctttgaatttttatttattgtacttaggctcggctacaatgtaaaaaacaggcggtttcggagaagaataccaaatgtatgtttccaccaaaattatgtcaatttacaagactgatatctagaatgttcatgctgatcagctagttatgtggttattcaaaaaatatctatagatatcccaattccaagatttgtaaattatgttaatataaacaaaactgttacttctatggagtttgaaccagcgtggcaaaaatttcctgcacccatattaatattaaattatctcaagctagtatctgatgttagatttgtactgtgtatcacactgtacgtatgcttgcttacttattactctattacaacagatatttgtgtgttttcattgttaaataatgtaacagaaatttgtgggtttgactgttctttttactgaatttctcactacttgaagtctaactagaataacatgtgactgttttataatttatagttcgaggttgattcagaaaagtcgtaaaaatctctcataaatgtattaccgtatggctctatattgcatatatgggcccaatgtctcaagtctcaaccatgttttaaattttcagtactaagcaatgcatatgtttttgttagacacaatttttcttctttttttgataaaatgtgagtttttttttttttttgaaatgtgattaattaccaaaatggaaacattgttacttgcaaaaatctttgggacaaatagcttctaagacaatttgttttttaaaaagcctcagaaactaataaacgcaaagattacaaatagagaactattacgagctaggcatgggaaaaccattgagagagcagtcaccgcggcctttgcggtaccttcgagccaggagagtgtctctaattaatgtgctcctgtcgatttgcttaaagacagaggcaaatctgttatggagactgtttgtacttgtcaaactatgggccatcagtcgaccgcagccattgttagacacaattaactatgtgcgccatctattatggagactgtttccacttgtcaaactttagcactatgcctttaaagctttaacaaatgttgaatgactgagaaaccgacaaactttagtctactacatcttatctatatactaattacgcaacaaaaaaataaaaaaaaattggataatgttttaaaacataacatattttactcttcttctatgacagatgaattactacattccaaaataaacaagtaaaaactcttgtttcgtggataagcatgcactaggcagtcaattcatttggagtctcaccaaaccaagtaccccatgggccctggtggcaaaaatggtcactaatcatgatatttcaagagttgtcataatgggccttaattcgctactgggcctcaagtgtgagccttcgtgttattgtcttttctagcttccagttgtgttagtgtgtttgtgcctttgtgttatggcccttatggcactccatattgtcacttgaatcactaatgtaaagtttattcattttcaaataagtcgctttaaatagaagcactagatttcatgatcaatcattatcaaatttcttataaaaaaaatcataaagcctgaaattcatttcatgtaagaatcagaatgaatgggtaaaggtgtttttggttgagagtaggtagaagcgtagagctaactctaaccccttctttagtttggtatgattgaatattagttcatataaatataattggtgaaattttgatgtgtccttggtcctttagaagcaaactgtaataatgcgaccgtatgatttggataaatctaatgtgggacaattcatgatgtgtcgtatgctcattggtaggttgaaagagagttgagcacgttcgtgtaagatttttcgattcttatgtcgtaaagatgaagaaaactctttaaaattacaactataaaaacaaagacaaagacactcttgacaaaattaaaccatattaatttgataagggatttgagaaaaaggaatgaaatggtgccgtaacactaagtcgcacgttcttgacgagagtcgtcccaatccaatgattaatatttggcaatttcatgccctccctccccatagtttggtcgtttattatgctttactcttagttttttttcttaaaaattataatctttatttatttgctgtcttttttttttataattgtcaattaggttaacaactatggtcaaattagaaaacattagtttttgttaaaagaaaattaaaaaaaaaatccatgtttattagtgaattaggtttttattttggtggtagtttagctaatctcataaaacagatagtaatttcataatgtaaaaagatatttctactatacagaaaaggaaaagaaaaaaaaaaactcattacaacggataatttctcaatttgtattcaaattcaaaattaaaagtgctcaaaattagtattatttaaaagaaatactaaagtggggtgagtgtaaatgataaggtgttgtttggtgtagcaaatagctggcataaggttggtattgaaaagctcatctcagaatcatcaacggcccaaaacacattgcaaattaaagaaaaagcaaagattttcctcattcttttgccattattatctctcatcgatttggcttgctacttttgaatttacccgtgttctactacgattcgggattagggttttttcttgagttagaaaagattgtttcttgattcttgggaatggctgggatttgaggaagaagaagtgcaaaagggttctttttttgagtttgtgaatttgctgcggagatgagtgcttcgaggtttataaagtgtgtcaccgtcggcgatggtgccgtcggaaaaacttgtatgctgatttcttacacaagcaacactttccctacggtaaagtttcttccttttgctctcagtagtgatcttgaagcattctttgaaaatgggtttttggagattattcatctttgttcttgaatgtgattgattagctggtaaaaattgtaaaaatcaattcttgacatgtttcttcagaacttttattgatgcttccatggatttagcttctttgttatttatctttacctatgagcattgttcttctttcattttggacttcatgttcaatttgtatgtattagtcaaatttgcagatatgaggatctataatcttttccattattgtgtgtgttaatgatgatccactattgtgtgtgttttagtttaacaaactctatgacttggttactgaatatcaggactatgttccaactgttttcgacaacttcagtgctaatgtggttgtagatgggaacacggtgaatcttggattgtgggatacagctggtaaataatccttttgaaactcatcaaatctggttttcttgtttttttgtggtttcattttgactgataattcttgggtttgtgcaggtcaagaagactataacaggttaagaccgttgagttaccgtggtgccgatgtcttcattcttgcattctcgcttattagcaaagctagctacgagaatgtagccaagaaggttagctttttgttgatctaacgtctttcatttgatagtaataactttcgttaagctgattttgaattggttccttcatttgcttttttttttttttttttctttatttcagtggattcctgagcttaggcattatgcccctggtgttcctataatcctcgttggaacgaaactcggtattgactctcttcttgtctaaaaactctttccttataataagaaagagatgaataataattcaagttttggaatttgcagatcttcgagatgacaagcaattcttcatagaccatcctggtgcagtgcctattactacaaaccaggtacataactccacaattctttaaaacaatagtgttttttgctttgcgagttcttgatctttagttgtttgtctgcagggagaggaactaaagaaactgataggatcaccaatctacattgaatgtagttcaaagactcagcaggtatactacacacataaataatatctcacatgtctttttgtttgggatttttgtatttggtaagacagtgaaaatgttgattgttgggttttgcagaatgtgaaagcagtctttgacgcagccataaaagtggtgcttcagccaccgaaacagaagaagaagaaaaagaacaagaaccgctgcgtgttcttgtgatcgaacatctcttaaaacgaaaaaaggtttaggtaacaaaagaagctgaaggaaaacgaacacctgcaacattgtatagttgttgaatccggcttgtttcggtctttactcttctttttgctggtgaatctaatgagtgaactgaggccaagaggaggattctgggtaagagaaggggatgtgttcttttcttggtgtgttgttgttgttgttgtacttttgctatgtagactaatctcttaatactatgttgtctttgtttttgctgttggggtccattttgtattttctttaacagaaatcttaattaattttttagtgactttttttaagcttccgttgatcttatggtcttgtattggtatgtaattagattcagacaacgaagaacatcttgagatagatctctatatacaataagattagagacatcgttgaattgaggcatagtttcaaagaatggtttacagaaacgaggattctatacacacaggtgaggtgagtataaggaacaaagaaaataacaattacaaaggttttctccattttgtaataagaccgaaaagaaaacaaacatgtgtagtgtacacttccttttcagagtttccaacatttctttggaaaatacagagaattcctctcgggatttgatgaggcttgtgtctcggatttaagtcacagcttgatagggtcatatttctcacccatcaaaccacctttctgttttatgaacttaatgtaacgcaatgtacttgtaaagaagggatctgagtggattgtcgtgttaccgttgtcgctttgcatctcattgttgatcaattctatgaggctctgtatatcagatggagtgatatgtggattccctttctcaaagaagtaaatgtacctgttgtatatgaaaaaaacatttttagtattgagatgctgctttgtgtatgaatctgtgtgtcagatgtttttgtttgtttgttgttaagtatactgacttgttcaagatttcaacaaacagcgtgactggtccgctgctacctctggttgcactagccatttgttgagctgcgttcgctatcctcagtgcacgtcttaaacagagaagaactctgcagaataacattgagaatcgattagttctggagataagaagatcaatgacttacccatggttaagttttctctcggctaatgacaacgaaacagaaaataagagaaaaatgtgatagtaatgaaagcggaaaagaacttacctttctccatctttaataccatctggatcatcgacccaaaagaggtgagagcatgcgtaaaccgctcggcattggtcaggcttcttaagaagccttgctgagtactggtcacaaagaaaatataagcgtttggatagaaattgagaagaaagcttgtaaaatgagaaatcattggcaaaatatttgtaccccggttgccttatgtgtcaaggtgtccctattttcaacaccaaagacattgatcctttgcaaggttccaacgatcagatgaatcgcagttacctgtgccttcgagtcctatattataatacaacgcaccacaagaataatgcaagtataaacttttatgagacttttagttatctttgtgtaaagttaactcagaaagaatgaagaaattaccgcaatttcttcctcgtataacataaatgcttgggtaaaaaattcataagcaacaggctcaagatcacagtcacttgcggcctgttcatgaatccaagataagacaaaatattgagaatgctatgtcagattctgccttgctacaaaaaaactgagataaaatgaacaatagattactggattccattaatattgtaagtcacgttattctgagttcgaaataatagtaaccctaaccctataaattacctctgcgcactgaaggtagagccttagagccagttcaggacatggaactgaggtaagaacctcgattgtctgaaaacaaaagcacatgttcaatggattacaaaatatattgaccattatattatcccaaataacccgatattcaaaaaatgaatcagtttgattgataaatgatctacttaatacgtcaaatacacagtaaagtgcacttagaaagggtactcctgcattacttttaaatgaatctgagtttatcaaagagataaacaattcacaagaatgacgttaaactcctgagaagccacagcctcagtgaaataacaacacatatttctctatcttagatatgtgaaaaacaaaagaagctcataaacctggttgagaatctgaaaaatctttctcggggttgctgaatcttctcctgctatatctccaccctgggattctagctgcctcaccaactgtgaaagaaacattatgcaactcgtaaagtcaaccgcttgtcttcaagcagagaatctgcatttaagtaaatacaagcatgttatagggaaataagagatatataccctaactgcagaaaaaacaagtgggggaacagtaaaaggcaagcgtcgaggtcctcctgtcataagatgtcgtctcacaacacatataatctgcatatcagtaaaatacccagttaagatattcggttgctcatacgatagggataatgttttaaaagaaaccatggcctcatagcccaatgtttatcgatttttttctgtaaaagaacgccaatgagcctaagccggtctgcaggtcaacatacggatgcagaccgcttcatggtagtggagcatgggggcagtagggtgttttgggtgaagtggagcaacagactaagatttacagttccacgaataaagggcatgttaaggttcagtgaacaagtcgctttagtaaatttatgatgtttaaccttaagcatctcctctggttcttcattatcaagcatatgtatgagacgggctactgaattttgttcctcctggaaatcctcctcgtcaagctaaaaaagacacataaaatccatcaggaccgaggtgttatagtagagctgatcagagtttctcactgcaaaccacacggaaaaaaaaacaaaggggaaatgacagcacctcctccgcgttggtttcatccaaatctttaataagtccttttatcaattcaaacagcacctcaacctagtgaacacaaaattagcatattattagtgcaaaatatttacatctttaattgaagagagtaagagtagtataccttatcagcagttgatatacacgaatcagttttcattatactttgaataattagcatagccattactttgttcgttccatcatcaagatgatccatgacacgcggataatttgacaatgtaagagctgtaactatgtcactgtacttttctaaaggagcactcaaaagtgccactacttgtttcattgcacgggcgtcctccagcttgggcacactggaaagcttaactacacatgcaccctacaaagttttcggatcaataattagtttaacgccagggctacaccagattcaagtaatcataaaactttaaaaatgcattttacacctttacaatgaaaatctgaatctgaacatatagtgtagacagagatacaagctacagagacaatactgactaaaagtttagaaaacatatggcaacgaaaggaaaccataccaatacttgatccacatagtcaagccgatcaggatgaactcggagagtaaaagtcaaaagagagacaaacagagtcatagctccgacaataggcatctcaagctgtgtatctatcacctgtagcccacaccaagtccataagtcaaatatatgtatttcaagaaaaatattgcattatatgcaggaggctgggaaagcaaagactcaaagaattgaggctattgacgaacagaatctacaatatgaactaaggtggttggatcatccagcaatttgatagcttgatttttaatggtctttcattttaagttctacataattttacatctgctcctcttctagctactgaagtctcaaatcttacaactagaggacagacatgttcaaactacagtggcttattttccatcatatgtcaaggaaggtagctgatttgacgatgcctaacaaaagagctgattaagagaagatgagcgaagattggaaaataacattacaaaaaaaatcaagctgagtacttctcagggtataggggacctacataggaccattctaaaggccattatgattcaagtatcaaacagccaaaagaaagttgcattcataaaagattttcctttattggaacccacctttccaattgcattgctcaatttagcaaaagcttccacttgcaaaaattcgtgtaacacctgctcagaagttaagaataagaagacatctagctaacaaacaaaaataaaaaggaacgatgatagctcaatgggaacttacatctggacttgaggcagcatagtttgataaccggtccattagttgggttaacactatcttcgtgtcaacagttggctgagaaattatttcttaaggtcagagaggaaggaaaaatgtcaaataactcttgagtgagaaaagtgctgatagtgaattcaatagaaaagtgctctgttgaggattccctgctcagagtttagtaattccagtcaaactgtaagagatcagggacctctttcaaaaacttttaattggtgagccaaagccctagtcaccaggaaataaacaaaaaaaaaactcgaaatcctaaaaatcaacaagaatagggaatacagacagttcagatagatccttttaggagataatggcagcataagaagagttaatcagaaagcaccaaacaaagcattgagataactagaattgcattggagagtagaaaagagaaaaatatcgattgctagcctacccaccatcagttgggtacaagcagccaataaggtctcaagagtctgcaaatggtactcatcaggaaagacttgaattatgcactccatcagataatactgagccaacttatctttacagttgacgacctgttcaaggttttcagatttagcagattatacatgaattgaaaccctataagaaaggacatggtaatagatgcaaaaatgagctgccgaacctgctctaagaccctaggaagaacagtctctttgtacatctcaaggtcaacaccttctatctgtcctagaacatgcagattttttccaacctgagaggaaaacattaaatacaacttagtgggcagtacatagcaaaaataggatactaattcaagtagtggtatcgatgttacaagatcacgaagttcgttcctctctttctcctgcttttctcgaactgttcctggtccctgcagtccaaggaacacctcagctcaggttcaccaatatcaatgattcacaagcaccacacaacctgcatgaccaaaagcatgctcttcatcgttcatttatgcttcagtcagaggcatgcaagtgcagaggtgctatgcgtatctaaataccatcaactcttcacagatcgaaaattcacctgatgctgtattcgaacccaaagcttattcatctctgtgaaattttgtagcacaaactccacagcatccatcacagtatttgcatctctacaagaagatcgcaaggcgagtaaacaaacaaacagctaaccaaatctcatgaaaaaacgaaagagcaaacccacccttcgtagtctgagccaatctcaggtaacttatccctgctcacttgagcgagataactcctcaaaaagaggccacgaataggatgttgaacacctcgacacatttccacaagatccttaagtacatccttcgaaggagcctgcttacttttgatataaacagacccgaccgtacatagcagatacctggtaaatcaatgcagcccaagagaaacattaatataggaggagattgccattttctagtctaatctaggctatatagctagaggattgagagtattagatctttatcagatcaagaggaatagaaactagctcaatgatgaatcagcttacattctgggcaatatgttgccggcatgttgaacaagttcatacaaatcaacaacaggtaatccatgcctactctcatccttaaagaaaatctccagctgcctcaattgatcgaaagctctcatatctaaattagaaggaaaaataattagaaactggtcaacacaagcatgaatcgagagattcaaagttctttggcgatggaatctacagagatcgtaatatttctgaggagagagcttggaggttcgaagctccgataacatcagagcagagtacttgagaacttctctgagattattcgcgtcctgagagacgaatagaaagaaaatttcatcagatcaaaaatgagctaattcaacggaggaaaataagaggaaacggaccaaagcgcgatgcatgaagaaagcgttgtgctggattccggcgattccttccgccagccacttatcctcgtcttctactccggcgagcgttctcatcttcttcttctcctccgtgtgtcagcagtttctttttttttttccagggcgcacgaaaataatagacttccctactcttttatttttatttttgttgcttttattaattcatcatcaaatgtttattttcaggtaattttgtaaaattgtaaaattttagcactgtacgtacgtttttgtttgagagttgaaacatatgatctggctatgacattgatttgaatagatctttagaattggaaacttgatcgattatggaattgaaccaagtattacgaagtcttttgatgtatcaaaatcgggttagattagaattgttgttacaaacagtcaaacactgtacaagctaagtctaaagctagaacaaaaagaatcgagcattagaacgggacagtataaggtaaagaataaatcccaacttcagacaaaaattgagctctaggccaagatgaatctcccggtctcatcatcgtgtcatcatcaaccttgactgctgctttgggcttaagcacctcttgcgtcttgttcccaaatagccaataatcaccattgtcatttgaagatgcatcagcaatacacatggaaggaggagtccaaccatcaaacaatgcattgtattgatcttctttgctagatctgtgtttctttctcttctttgtttcatctattgccgctattgatgttgacggcagattcttttcaagctcggatgtttttgaacttgagatagaacttgttatgacatcttggtgactgagcgactttgcaactgtagtggagcaaacaacagcctctctaggcagagtaggaacttcctcctttggttttttgaagaccattctaatccgtagaggtttacctgctacaggtgcagctgcaaatacatgtgaaaataaacatgtaaataacctaaaagcagatatcaacatgatcttcttcttgaatgtctactaagaaatagatacaaacctttgatgagactttcaacagccggaggagaatcatctctaatcctcttcttactattctgacttccatcagacaaatatccaaggtgtttttgaggttcctcaagctcatctgtcaaaccactcttctctagtgagtcagactcatctgacactttcttggaaggaagaaatattagcttgtgatgattatcagttgctttaatcgaatgtttatgcgatttctcacgcttagtttctttcttttcttttctcttctccttcttttccttcttctctatccggtgcgccttttttgaatcaagtgtgattcttttaagctttaatccattagagtaaagggttttagactccacgtctttcagaaccacagttcaaccatcccactcaatgtgcaaaaaccattacaataaacaaagaagctcctacaaacttaatcatatacatatctagacctacaaaatcaaactaacagaatggaaaacaatgcaacttacctgattcactcctaatgattgctgatacagtgaacacatgatgagattattgaaaactaatatgcaactctttatatagtgttaatgataatcacatgataattagcttatatagatttatacatgatagggtttcagagagaaaaaaatacgacttatgaaaatatagccatacccacaagaagtgtaacccaaattcaaagattactacattgaaataagtttccccaaaaacgaatccaaaatcaggttttacgaaatccgtagaaatcaatcacacaaaaaaaactgaagcaagaaaccagatctgtagctcaacgaaccttagtcgattcgaccaagttttgaacgccaacgtggtttcttgcaaacacaagcggtgggcaagtgagaacgcgcgacatattttctctgatccaatcgaaggatttaggtctcgattctaacaatccaattaacccaagattagcttcagattcaagcaacctaaaaaggaataatcgagacaaccccgtgagctcgatttcgctaacccaaatccggagataaaccctaaaaaatctcgacctagagcagacagtgagggggagaagatagctaagcgcgtgtggtgaataaaaaaaaaagtgaagggtaaggtccatatttatagacgcttgagagttgagatccaccgactcgggaaagtcggtcacattgaaggtgttttcgtaagttcacattagagaaaaggaaaacactaatcaaatatcgtggagggtatattagtaaattacatagacgactactggctcggtccgagtctccgatatttgatacggtttttctaaaagaccttttcaccccttgacttttttctctaataagtacaagatggaaacataggcctaattttggttattgggcattagaattcctcttaaaagcccacatgtatccgaaacactaaaaggcccgttctcgtcgaaacgatgccttggttttggaagttgtatctcatcagtttcttacaaacgcgtttgttgtatctgaacattcgcgtctctatgtttcatacatttctgattttccctataagttcaatacactagcaacgtcgatgattagggtattataatctcttcgtcacacacatttctttgcatctacatttgtaaaagagactctctcttcttcttttggtctatcaaagatgcaagaaacccaaacgaagttgtctctgagtgtaacaccagttaatgcaaatgccccactcccacagaatcccgcaattcctctaggcttgattgctccatatcatcaacaagcaaaagacattaaccatatgttacaggttttgatctgttcttatatattacgatgatatttttatgtttttcatcaacatatatttatagttaatattcatgcatgtgcagaaccagatgacaagagaattgtatggtcaattaagaagtctcgaggagagagccatcttttgtgtgagggtaaaagacaaagtcatcgaagatatgaagaaacaatgtggagaaatggagattcgtacgagaaaagcgttagcagaagcagaattttggaggaagatgacgaatgagaaaacggacttgtgtagagaccttgcggggagacttattgaaatgaaaaagagagaaagggcgacgagacgactgggggtgagggaaatggcagagaaggctgagtcgtctactggtgataatggtgacgatgttgtagacacagcaagaacccgtttgtgcaaacgacgccgtctttgaaagaatgagtcgggatttgaggttgtgacgttttttaagcatgtgtgtgtgtgaagatgacatcatcatgatgtaactcggtgtggtttatcattgtacccacttcctagacatctgagtttataaaggggagagggaaaatgtttgataatatcattcggttatatgttttagtgcctatatatatatttgttacatgcgcactttatttttgaacatgaataatgtaaaccatgctacgttttatttttctttttcaagattatttaacaatttggtaatgcaacctaatacatattatgatggggttgaaagcctaatatttaaaagctatcgcaatgataaattgttgctaattttccacaattaatgaagatgataaaaatttcagtttttatagttagacataagttcatatgaagacttcttagtggcacataggtaatgatatgatttgtatgtttgtagataagctgtaatgaattttctaattggacatacacacacgggaaaaaatttaggattcgaaatgaaaaaccgacacattttcttttctttatgtttagtatacgtgaaaatgttgacgactaattttcttttagtggtttggtacaaacatttaaaaggatatgaactgatccatatatagggactagcaactttttctcgtttcaatccatataatttaatgattataaatcaagaattagtataattataataacaaatgttgcattagttaaaacttataatgattgtctaagattaatggacaatatggttagttgttgcaaaggtaaggaaacaaaggagcgcgcaaacgaccaattttttcaaattccctacgaaatcagttttctggtgccggttttagggtggatacgatcatacaaggcgaaacacatgtggacaggtggataaaaacttagtcacgtcttgcaaaaacattaactgtgtgctgcaatgtttagtattcgaactaaaaccaccgtataggttcgttgtaaagtaaagtccctatgcacgacataaaaaatcaggtcgcgaagatgagtacgcaactacgcatagttgatctcttaattaaggaacagaacaaaattcggtatatgtctgatctaatgagaaagagacatgaattaatgcgcacctgttaattgttgtatcgtcgtggatgtgattgtatcatttaatactattctcttaatttctgttttttcatatagtttattgactagtatatgaaaataagtgatttgtgtgaatgtcattgttatattatcacttagattaatcgccgtattttgttaaacatattttaccatatgatcgtttatactaggatttgaatataggattggagccaatttaccttcgtactgctagtgcgaatcatttcctttgttcattacctcatttttaaaaagtattattttgttcgtttacaagttgtaccttaataatcatttcggattttatttcggaccatagcttaaaaaattagaatttctcggcattcaattaatcaggactatgcctaaacaggagaatgaatatttacattcttataaaaaaaaaattatacaggactatgcttagcttgtttgattaatattgctagaaaaaaaaagtactagctttaattagatagcatagtaacgtaattgaaaaagcggttaggaccttaaacaagacggttggaaaccgtataatgtaaatttacaaccgctttatttatcaaaataagctattgaaatgttttttgaaaatcttaatacttcatattttaaaagacagtattatggatttttctgttgcaaataatatggatgaaaaacaatgtgactcatgaatacgatcgagcattgcaactgcttaattaacttttgacttatcactacacgttcttctgagttcaaactaccaatttgtatatggaaaagaaaagaacgaaaaagaaaagaagtccttaaaccggtaccgatagctatcacgggtactttaattaaatgtttaggcttttatatgattatatatctctaggctctatagctgttttgagaagatatatatatggaaactttacgtgttcattttctcgaattttgaagtctttatttcataatgtgttttcttaaactcaaattgcatttactgctacaccggtgaacagattgtggcattatgggtcctatctcatttaataccgatgttaacacctatatcgggaagacattgatagagtttgaaagagcataaccacgtggggacgtcgacaattatttggggaatagttgatagattagtaatagtatctactctatcattatatatagaaactaataaacattactacattagtttgtaagaaaaaaatctaaaacattagtatacgttggtaatagtatataatgtaacaaacacatcttttggtataaaactacaattcataagacctgtgtatatatatttttagtcgtatgagcaattgtacgatctacaagacttaattggctctgtaacaaccaaatataggaaatacttgtacaaaaactggaagtgtcagtattttaaaattcagtctcagtttcttaaaaagcaattggtgaaatgttttaaaaaggtgacagcatctgcttctctcaatttcactccaatgtggaagtgaaataaactaaaacagtcagtacgtgaagttagttatcctttgcttttattgccaatccgtaacaactttacattttatgatgattcattttttctattttactagataatattatatactaatttcttaatcaaagtccatgtgattgaatgaacaatcattttttctcttctggttattagcacaatcatatatattactataatcttaaattacaattgactgaatgaaggacaatcatatacattacatacatttatgatcgattttcaaatataaatacatacttatatactagtttagacttaaattagtgggtggacactaatatacgtcccattaaacctttgtgtttctttaagaaaaggctatgcataattatgttggatattgaaaaacctaggaggattaattctttattcatatttcaatcaaacagataagtgtgaaacaaagtttatagggatttttggcatttgtttccaaaagtacattgttaattatcaaaaagtgtgatcctctaaccataacacgtacttagatattaaaataacatgtagacaaaaaaaatgtcaatgtcttcaattaatgacaacaactaaaccatacaaatcacgtagacatatatggatatataaatatctacgtaggaaacgagaggaggactatttacatccatcgttccaagcttttaaagaagcaatattttttgtgttttgttttaagttttaacacacaaacacattacctcgaattcgatacgtcatagtaattagcaactatggaacgatgtcgttctggtcatcatcgcatcatttcttattatctctcttcttcgttgatactattttggtgtattttcgttctcgtgctgttatctacgacaagtactacaaatgctttagtgaaaatcccgaaaaacacgaccgttccggcggtaatagtgttcggtgattcaattgtcgatgccgggaataacgacgacatgataacagaagctagatgcgattatgctccctacggcattgattttgacggtggagttgctacgggaagattctctaatggcaaagtccctggtgatattgtaggttagtttgcctgtaattttattttcattaaaattttcattgtagtcttacaccttgcattctttttattggatagctatatctatcgaatgcatgaacttgattaatgatttgcagtccgtgactagtttgattttcttgctctataaaatggtgtacaataaagttaagcacacaaagttgccactttataataattcaaaaatagtaaaacacttaaacaaaacaaaaaaagaagaatatcagaagtgatctaataattatattataattttcataactcatttgtttttacagcggaagagctagggattaaacccaatataccggcatatcgaaatccgaatttaaaaccagaagagctcttaaccggtgtaacatttgcttctggtggtgctggttatgttcctttgacaaccaaaatagcggtagttaattttgagtacctatgcataatttaactttatctaaagaagttatgttaaaataacaacaatttctgtttatcttgttaaagggaggaatacctttaccacagcaattgatatattttgaggaatatatagagaaattgaagcaaatggttggagaaaagaggacaaagttcataatcaagaatagcttgttcgttgttatatgtggtagtaacgatatcgccaacgacttctttactctccccccggtccggctacactacaccgtcgcttctttcaccgctcttatggccgacaatgctcgttcttttgctcaggtaaagacaatttacaattgtaacttgtaaggttggtaataaggcaataactaatgtcacgaataaggttagtaaaatgttgtctttattaaaacttgtttttatttatgtggtggcagacactctatggatatggagcaagaagaatacttgtatttggtgcaccaccaataggatgtgttccttcgcagagaaccgtagcaggaggacctacaagagattgtgttgctaggtttaatgatgcagcaaaacttttcaatactaagctctctgcaaatattgatgtcttgtcaaggactctacaagacccaacaataatctatattgacatctatagtcctcttcttgatctcattttaaaccctcatcaatatggtaatcaatcattattactttattttcaacatatttttaacatcccaaatctgtttttataataaaagattaaaagtgtatatatctttattatgaatcttataggatttaaggtggccaataaaggatgttgcggaaccggattaatagaagttactgcgctatgcaacaactatacagcttctgtatgtcccataagatctgattatgtgttttgggacagttttcatcctactgaaaaagcttacagaattatagttgcaaagcttttggatagatacctcaacagattcttctaatcgatatagctcctatttcttagcatgttccatacacttttaaataatcatttcaactcaaagagagaattacacttctgtcaattttctctttttcaaggcttgtaatggtctcttatgatatttgatggttatatatatacaaggttatacttttatatgcttttttttcttttcacaaaggcaatttttgttctttttccattttcaacgagaaagattgattataaccctcaaaatcacttgtcacagtcctgatggagcttagccttactggcactgcacatatgaaaaaaaaaaaggaaatcaaaaagagaggcaaaaacaaataaacaattacataataaatatctttaataaaaaaagagaggtggtaattaagcataaggcccaaggttgacaaaaacaaattatgtataaggcccagttaaatctgatgacgcaggcccgaaagcaattagccaattaatgtttttcttcgacaacttattgacaaatatagtaatttcttttttttttgtttttttttttgacaaatatagtaatttcactatgcccaaaatttattttagttgaagaaaaagggtttacgatgctaacctagctagttcgttattaaatgttctagacttgactattggccattttgaataaaaagtcctcatatgttaaattttcacatgtcgatccaagctctacatatatatatttactcatcattccaaaagcttccaaagaaacaaagagtaacaatgaaacgaaacagtataaatattcatcacgttacttctttttcttcgagtccgttttggtgtgttttctttctcgtgttgttatgtaagacgtccaccaacgctttggtgaagcagccgccaaacgaaacgactccggcgataattgtgttcggagattcaatcgttgatgccggaaataatgacgacattatgacaacgttggctagatgcaattatcctccttacggcatcgattttgacggtggaattcctaccggaagattttgcaacggcaaagttgcgactgattttataggtaaatttcacgttgctttctcagatgtaattttgattatatttcgagaatttccccaatagataacaactaaacacacacttttagttgcatttgtgttttgtgaacactctgaaaacttctcaagcctgtaaactgaaaagagacaaaaaatctatagaaaaccttttatcaataaaaaaacaaaacaaaaaacttatataaaagtcatttattgtatcgtacgtagtgctgaataatatctaagtgactgactagtgttaaaactgttaatatgtatgtaatttacattattgactaaagatatacgtatggtacacaaaaaaactccagaaaatggtaccatcacaaaaaaaaattattatattttacacaaatgatctttcttttttttccaagttttcaatatgtgtcattttcttgagatataaaaactcaaaagcgaaacatcaaagaaattaaggacaaatgatataaatttatataactggtaatagttattttctcttgcaaatcatagcgggaaaattcggaattaaaccaagtataccggcatatcgaaatccaaatttgaaaccagaagatctcttaaccggtgtaacatttgcgtctggtggtgctggttacgttcccttcacaacccaattatcggtaatcaaacttctaaatcttacactatctataaaacaaaatatgattacttctaagctgtaattagacgtacctttttatatataaaccattgttgttcttaaagggaggaatagctttatcgcagcaactgaagttattcgaagagtatgtagagaagatgaagaaaatggttggggaagaaaggacaaagctcataattaaaaacagtttgttcatggttatatgtggcagtaatgatataaccaacacctactttggtcttccttctgttcaacaacaatacgacgtcgcttcctttaccactcttatggccgacaatgctcgatcttttgctcaagtacgtatgaaaataattaatgaactatctccttatttatatagtatcaaatttaatgctcacgtttgtcgtaagagtttattattgacgtagaaattttaatattttgctttgattacctttaccctttttatctttctaaaccttttgaatgatgtggtattcacagaaattacatgaatatggagcgaggagaatacaagtattcggtgcaccaccagtaggatgtgtcccatcacagagaaccttagcaggagggccaacaagaaattgtgttgttaggttcaatgatgcaacaaagctctacaatgttaagctcgctgcaaatttgggttctttgtcaagaactttaggagacaagacaataatctacgttgacatatatgattctctccttgatatcattcttgaccctcgacaatatggtaatcgtcgttcgtattaatataaacaattaattttcaaattaaaatttccattttatcaaaaagttattgaaattgtatgtcattcattaatgtaacaggatttaaggtggttgataaaggatgttgtggaactggactaattgaagttgctcttttatgcaacaactttgcagctgatgtatgtccaaatagagatgaatatgtgttttgggatagtttccatccgactgagaagacttacagaattatggccacaaaatattttgagagatatgtatgatctcgacaatcgtgtaagtcatagcttgatttatcgtgtcttttgatgtttattatcttattagacgtgacctcgaaatgtttttccaaaagaatatgatttatgtattttgagacaatttccattcgactgagagaagccttaaaaactatagtcgtaaaaaaaagtttgaaaaatgtctacaaaatttaataatatgtgacacaatagataagtaaaaatgattgatatgattttttttttttgaactatcacctcttttgctgtttgcaaattgctggatgttttctcggtgcgtttgctttctcttatgcctgtaaatcttcttttttcttacgtcgaactatttacagttaatcgcttgcggcatgatccaatgcccatctcttgtgtgccatctccagacaattaagataactttgcgtataaatttgtaaaatttggctattaccgaaattaaaatgctggtacgttgctagtaggagttacccaccaccatacctatttgttaccagaaagcccacaattatcgaaggcaatatagcccaacaacaaagaactaatttgaactcaggaggttgaacgagaggcctagagctgagagcccactcaatgagaaagaagaaaaggtcaagttgaaacttgaaacttgaaagagcctattcaagcgatggagctgatttgagatattgagttgagaagacattttttttttttaaaaagacataatattattagctgttgtttcaataattgtttgctttactaattcgagaaaaaaccctaaaaaattgttatataagaaaatcgtaaacttaggtcaaatgaaaagatatagatttttttaaaaagttgattaatgtacgtaccttaaaaatagatataggtacagctctgtttcgaccacatatctaaacttgaagatagcttattaggccatgcaccatttgtcacgactggttcggcctattaattctttaacacccacattaccggtaaaactaaataaaattaagaccgaacattttgatttttagtatatgaaacaattggctgtaaatgtaatagagtaagtcactaaccatctcactctaaattatctaccacgcgataggatcaaaatcttgacctattaagtctgtgagtaatattggacccactaataaatgatcaaattaatttcaaaaacaataatgaatgcttatcaagtcgaattcaaaacacaaatgccttcaatttattttttggtttcgttggtcttcattatacatggaactagttagttggtcattactcgaatttctcgctgtcgagttattactatatatgaattcaactacgatagtacatggtctatcttgtgaatactatagacatagtatagcatctataatatcgttgttttatgtatatcaaaattgctcgttttataatcttttcctacggattaaaatattatttgagcatgcatcgcaaacatttcttctaatttaacaaaatcacttaagatattttaatccactattttttttttggcagcctgtaaaagaaaaattataaatattgcaactatctacaaattaatgtagtatgatattcatttaaaagatgaaaagcaatataagacggataaaccctaaagcatttgaagatatttatatattttttgtttgtacatgtttatagaagaaacataattatgttagatagtggttgggagataagataatatggttgtgtgaatcattaaattaaatttcacattctagtagccttgccgatatatcatagtcttaattaactagcatgatttttcggatacttgcgctctgccttactatttatattctataattattagttttggaccatcgttatgttctagcattaacagcaacttctctagaaatatgctaacattttgcttttgatatatttttagccacaatactttttcatcgtaaagtcttttttgtaccttttcacgtgtacatatttatagagaaagttaccttcttcacactcagttaactggaaatagtagtatcacctattgcttgtgatctacatctaccctccggtccctacgtcttagttcattttttctttttctaattcgttcttatcatatgattcgctatgtcggttttaatttataggattctaaaatataattaaaactagatattgatttatccaaaaagaaaatgatatgttatgctagagaccaaaaataataccaacaaaatattctatattgctgagcttgatgggctctagaagtcttggttgtattaattatgatgacctacaaatatgtagtttggtaacagtttacatcacatgctcaaagattttaacatgagattcttaaattaaatagtattactaatatcatattttttaacgtaccatgattgttatatgagattctaaatacaaatatctactatatatgtagagtaattaataccataagtttttgataataattgaagttatactcatttgtgcagagatagattacttgtaacaccgatgttatgacttcagaaaacattcaaacactcaagtcaaaatggtcggaaaaaaagaaggttaaataaccgcattattgatatgatatgtagttgtttataactttgtgtattttgaagtgcttttaatttttttgaattttccatgtattatctctcttttaacgtatatgtgaatgtcttctaaattcattggatgttactcaacaagattctgatactgtcatactgagtgtctgaaatatagggccatttagttgtcagtcactcagtctgttgtaggagtcacaaataaagtagatctaccttagttatcctacgaaacagagtatgcattttgattatgttggtgcaatatatttgatgtattatcccaaagagatgcatatgatatgtttcatcagatattgttttccgtggaatggtagtgctagtttttttttttttttttttttttttttttttttttttttgtgtgtgtgtgtggtgattttctggccgaggcgaagattactctttcaaaaatctcttaaaaattcagattttacttatcgcatcataattgacaaaaacctaataactaaaatatagacaatgcaatttacattcaaacgaaatcagttccagtcaaccgaactatgagcacactgacgtaaatatgatatgagcacaaccaaatgtctaaatctacatttaagtcaacgaaatttaactaaataaaaataaataaaagtttttgatgtagccttatttgaagtaaatttagtgtatataataagattaagtaacattttaccaaaaaagtaacaataataaaatatcatgaatttatgttttttccccaaatcaaaataaaacctactcttttatgaaatgactatcttttagtggcaaaaccaaaatatgaaatggagcaagcagagtatttaatgctcctataaagtctagaaactctgacagcgattaactaatcccctcttaattagcgttgatacacatacgcactatatagtaatattacctgtctgtcatataatctgtctgtcacattctgctggcaataatgtatttcgatatacgccctaatagttatgttttgtcaaaagtagtccttttttttttgtgcaccaacctagccaagtatatatatgtgaagaaaaaaaaagactggtaatctggtatggttgagagagagtacactatctaatttaaacaaaaccaaaaaatagagagtagtgagtacactatctcagttttctcgaggattattaacaaaaagtgcattttaattaatactcaccccttcaaattattagaagaaaacacctagtttcaagcagttaattcggtcttgtcctaattaagtctaccggtccacaacatctccacgacccaatgcattacacatatacattataaataaatacatatatcgacatgtgtctatatatataaataagtgtgatagcattgaagagaagttgatttagcctctgtttgtccttgttatgttgttgtaaaacttgaaactttggaagcaaactcatttttataacaaaaggaaatcttattttatacattacattaaagcaacatgaaagacaattcaagctggtcttgttcttgttcttggtcttcgtggaaaatatgtttgttgtctgttctctttctcaccgagacgatcaccgccgtgaagctgccgccaaaattgattattccggctgtaatcgctttcggagactccatcgtcgacacaggaatgaacaacaatgtcaaaaccgtggttaagtgtgattttcttccttatggtatcaatttccaaagcggagttgccacggggagattctgcgatggacgagtccctgccgatttgctaggttccttctctttaaccttatttctaaagcgaatagccaatgtaaaaaaatattacgtatttatatataatgagtagcgaccattaattactaggacataagtagtgactacggcaaataaaatttgagcaatcatttgttttcttttcccttttagaagtataagttgttaaaattaactctagtaacattgactcaataattatgcgtgccaaaatttattaagaaaattccggctcgagtcttctacagtcatgatgttaagaaatgtctttaaactaacgtcatttaaataaaaaatcatgctctgtttgtatttgcagccgaagaactgggaataaaatcaattgtaccagcatacctagatccgaatctaaaatcgaaagatcttttaaccggtgtatcgtttgcgtccggaggttctggttatgatcctataacaccgaaacttgtggtaaatactatggaaattttttatcatggtgtttttcattgcaaactcctatggaaatttttgattatatatttttcctaactcgttggtttaatttttctttgttaactgtattaggcagtaatatcattagaagatcaattgagttatttcgaggagtacatagagaaagtgaagaatatagttggggaagcaagaaaagacttcatagtagccaacagcttattcttattggtcgcaggcagcgacgacatagccaatacatactatactctacgtgcaagacctgaatacgacgtcgattcatacactactcttatgtctgactctgcctcagaatttgtgactgtaagcttctctcatattttactaaaaagcctaatacgtttgatatatatacattatactaaataacatttttaatagacggctatatttctaggtaattagtataatgtttagtgtgaaatgaaattggcagaaactatatggatatggagtgagaagagtagctgtgtttggtgcaccaccaattgggtgtgtaccatcacagagaacgttaggaggaggtatcttgagagattgtgctgataattacaacgaagcagcaaaactttttaattcaaagctctccccaaaattggattcgttgcgtaaaaccctaccgggcatcaaaccgatctacattaatatctatgatcctctttttgacatcatccagaatcctgcaaattatggtaatacgcaaatatttttttggtttaaattttcatgcatgtactattcgttttaattacttcaatataaaaaaggtaccatcttttgttattgtagggtttgaagtgtctaataaaggatgctgtggaacaggagccatagaagttgctgtgttgtgcaataaaatcacatcttctgtatgtcccgacgtgtctactcatgtgttttgggacagttatcatcctacagagaaaacttacaaagtattagtctcactgttgattaacaaatttgttaatcagttcgtctgaattaaaaactattttcacggcataatgattgattatattttatctcatcttgtttgtattatttgataattgtattcgatttaaataaaattaatattttcttgttgttttattttttttactacacaacttaacattcttgtagttagggcctcttcgagtacatggatgaatgtgaatctacatgacgaaaccattgacgtttacaaaacaaatcatcatatatatcattcattctaaagtcttgttttcttttctttttgtttggtgtaaagcggctacatattctttattttttttatttgtctacatttcgtcagatttgatttatggagttaattattatcttcctagctaaaacatgctgacattcatcctgtgtgtacccaccactttcatgcatttttggcttccttagacaacaaagactagacgtctaaaaatacttagaaaatcacttgtatatatttactactgacatgagcttagaagcaccactaattaaattctctataaaacataagagagtctaaacactgtggtagaaaaaaatatagacttttagatatgtgtagtaaaataacattagtgttaactttattttccagttatttcatatcaacagatgctgtgaatggatcatttcctgcgcttttggcttttggagattcaattctcgatactggcaacaacaattttctcctgacttttatgaaaggaaatatctggccatatggaaggagtttcagcatgagaagggcgacaggaagatttggaaatggaagagttttctctgatatagttggtatattatcattttttttacaatgcttctttgtatttcctaatttttctcatattgcatagcttagaaaatcatatggtatgaataatattattctgatatagtaagtttattattactacagctgaaggtttagggatcaagaagattttaccagcttatcgtaagttgttcaattctccaagtgaccttagaactggtgtttgcttcgcatcaggtggtgcaggagttgaccctgttacatccaaattgctggtgaaaataataattataaatttgttatttctttaaaaaaatatattatatgtcttaactaaatatacattttctaataaatattgtaatttattttgggtggtgatttggtcagagagttttaacgccaaaggatcaagtaaacgatttcaaagggtacataagaaagctaaaggccacagcaggtccttcaagagcaagtagtatagtttcaaatgcagtgattcttgtttctcaaggaaataatgatattggaatctcatattttggaactccaactgctgctttccgaggattaactcccaatagatataccactaaactagctggttggaacaaacagtttatgaaagtaatacataaaatcattttcttatcaagcatccatatatatatatgaagtatatatattcgttcacgttttttttgttctatgtatgaaggaattatacgatcaaggagcgagaaaattcgcggtaatgggagtgataccgttgggatgtttgcctatgacaagaatcttccttggtgggttcgtcatcacgtgtaacttcttcgcgaatagagtcgcagaacagtacaacggaaaattgaggagcggaactaaaagttggggacgtgaagcaggttttaggggtgcaaaatttgtctatgtcgacatgtacaacactcttatggatgttattaaaaattatagaagatacggtaagtaaatacccaccaccattttcccttgtttttttttgctaacaacatgaattatattggatttgaattagatggggatataattataatgacgaaaactattgattttatgtcacatttaactgttcctcattcttaaagatcttgtttaccgaatttgttctatcgcttgataatttatgtatatagttactaagtatcatgtacttgtatggttgcaggattttctaatgagaaaaatgggtgttgttgtatgattacggctataataccatgccccaacccagataaatacgtcttctacgacttcgttcatccatccgagaaagcttacagaacaatttctaaaaagcttgtccaggatatcaagaatggccttgcctgatttattatatatacaatgctttattttaattttaataacagccatcgttaataatagaaatgagaagacaaaaatcatacatggcgatctctctgtttttcttatgttaaagaatgtataatccagtttatgtattgttcactttatataatcccagaacaacaaaggagtttgtttacaaatgtaaaccttttcttttttgccaatggttagaaaagaacgtatctaataacaatcccctagcaaataagaaaatgaccaaattaacacttttggaaattagtgaaataaaaatccaataaggtgatttaaaaactcatgtttttgatgacgatagctaaaattttatgaatttaaatatcgtcaaaataaaatatcaacttcacttataagtattccgtaaaacatattggtttaattgtgaacattttttcatagaatatgtccgatatatatatttcttcttcttctatatgtgccagtcgggcaaaaaaaattgtgaatggcaaatgaaaaaggttatgcattgtaaacgaattgcttctagcaaggtccgcaaccactatatacaaaatgatgcaagggatattggaattttacttttttatttatttaatttctatttattatacactagtacatctgttcttcttagccctgttctttaaaacaataagtcaacgtggtccagtaatacaaaggaggcagagcacaacgttagataaatgaaaagcaatggtttagtagaaagtaatacaatcaaaatatatacaatcagtatctaaactaaaaattagtaggagcgtatcagctaataattggaaagtatttgacccgaaccgtgtataacggctagattatcaccgaacctaaggttagtgtttgctctggactataacaaaccctaagtgaaaaggaaaaaaggaaacttgagtgtcaaacaaaaaaatttatatacatgcgtctcgcgtctcctttcaagttaaaaatgcaattgctctgaattttttttcaattctcttcttcgattgttgtctgcttcgtttgcctctctgttctcttcttcttccttttttgagatttcattattcatgagttgttgcatctgcttgttggattcaccctaatctttggtgtgattcgttggtatggcccaagaaagactcatatatacaacggctctctctgttttcacttaaaaagcaacgaagaagacgagagagatcacacacacaagcatcacatcttaatttgtttgcctgcgatgataagatctatcatccaccgtagaaacagagacatagagagagacgattcgaaggacatgttgccgggattttaggcttcgtgagtcatgatgttggaggttctatccggcgatggaggtgtcgatagattgaggaggtggagcgatcagaggattttaggcttcgggagtcatgatggtggagcgatcatcggagattggcgatggagattgaggaggcggagcgtattttccgttaacgggtatagatggcatgtgctctcagaggcccaatagaaacaatttcagcccatcaaacaatgactagcccattgccaggttaattctcagcccattttcttgtttagttaagaaattaatatattttataattttaattaaaggcttttttctcacggattttttattttcttgcaatttttatttaaagttaatttttaatatttttagattaaaaaaattattttttaatatatataatatttttgtttttaagtgttaaagtttaatatgtgtaaaataattggacacaacatcccgtccataatatgaggtccttaagcggtgttctaggttcattaaatattttatacatacaaaattttaacatttttaaaaaagtattttttgggttttcagtatgtattattttttaaatatacataaagttttaatttaagtgttagatttaaatatgtgtaaaccaaaaagaatgtaaataatacatgtaatatagacataactctttttactaactttcaaaaccatactttatataataaaattgatttttgatttaccaaatcaataaaggtacatgtacaaccaattactcttttttttttctttttgaaacaaattaatggtaataagatcaatggtttacttaacttaatagaacttttctttttcataaattttatatttacatgatattcttaatagatgagccatgacttttatatagcaataataagatgcactaaaacatagtgataatattattttagcattttttaaatgagagtgatagaattattatcctcttaaaagctaaattctaacattcattttgtgtatgttaactctcatgctttttgccttggacaaacaaaagctagacgtctaaaaatagttagaaaataaaacatatataagatgaactaaacactttgggggaaaaaaaaattatgaacttaattagggttctatatgtttagaaaaaaaatgttggtgttagcattattttccatttacttcttatcaatagaagctgtccggaatgaatcatttcctgcgctattagcttttggagattcaatggtcgatactggtaacaacaattacctcctgactctaatgaaaggaaattactggccatatgggtggaatttcgactcaaaaataccgaccggaagatttggaaacggaagagttttctccgatgtagttggtataatattaaagagttctttacaatgcttttttgtaatttctggtttatatcatattgtttggctaatcatatagtgaagttctttttttccaaccgcagctgaaggtttggggatcaaaagaattgtaccagcttatcgtaagttatacattgctccaagcgaccttaaaacgggtgtttcttttgcatcaggtggtgcaggagtcgaccctgttacatccaaattgctggtgaaaaaattattgaacttgttatttggttaagaagtggtatatattctaactaattcgggtgtttgtttgatcagagagttttatcgccagctgaccaagtaaaagatttcaaaggctacaaaagaaagctaaaaggtgtagtaggcaggtcaaaagcaaaaaaaatagttgcaaattcagtgattcttgtttctgaaggaaataatgatattggaatcacatatgcgattcatgatgctggtatgcgattaatgactccgaaagtatacaccagtaaattagttggttggaacaaaaaatttataaaagtaagatggagaaaatgaattttttttattcatcaacactgttatatatgtgtttattcacatttttttggtttttgtaaatgtatgaaggatttatatgatcacggagcaagaaaatttgcggtgatgggagtgataccattgggatgtttgcctatgtcaagacttatttttggtgggttcttcgtgtggtgtaatttcttggcaaacacaatctctgaagattacaacaaaaaattgaaaagcggaattaaaagttggagaggagcatcagattttaggggtgctaggtttgtctatgtcgacatgtacaactctcttatggatgttatcaacaatcataggaaatacggtacgtaaatacgtaaatctcctttttataaaaatatatgcattaccaagatcaatacaaaggaaccacatatttagtgatgcttagacatttgaaatctcaggagcgaccataatagttaggtattgtgtacttgtatggtttcaggatttacccatgagaagaatggatgttgttgtatgcttacggcaatagtaccatgctccaacccagataaatatgtcttctatgactttgctcatccctccgagaaagcctacaaaacaattgctaaaaagcttgtcgaggatatcaagacaggacttgcctgatttcttacaatgctattttcatcttggaattaccataattaattatatacgtacttcttctgtttcaaaatctttgatgttctagagaatttttttttgttttacattataatgttctcatttttaatgtaaaatttattagtttaaaaaaaatgttttgaccatttatattttgcagtttgttattttgcagttggttgaattgtgttagataaataataaataatgtttttatctacaaaaaataaaaaatagaataaaggatttttttattttttttttcacaagaataaaggattttcttattagtgtacaatatccttaaacaatctcttcctccaaacacatcagactagtcacgcttctgctcactaaattttattctatttcaaatgaaaagagcgaagcttcttgaactctacagctcttaccaaactactttaaaatcttttcccactgtcacgtttcagtactaggactccacagcatctcgacgatcatatgtgcaaacttcttgaagctcaaccactatatatcttctatatcatttctcatttaaaagttctcctgctggaaaagtctaaacaattcgtctgtacagatttaattttcatttgtaaaattaaccgaaaccaaaagaaaaaggaaagaccaaataagaaatcaacaaacttgacaattttgactaaagtaagataaatttgatcgagtttttttcataaaacatggtttgattttctaagaattttgactagtaatagcaagcaacacaaactaatctactagtagactaggctgcactatatttgatcggagagtcattacctgcaaaccaagttctcttttatgtaaattaaatcattattttataaaatggcatttttcatgagatttatggaattattatcgtcttaaactatcctaacattcattcggtgtgtaatattgtactctcatgcattttggcttccatcgacaagaaagaagtagacgtctaaacatagttaggaaaaatcaaatgaattctatataaaacacaggataaattaaaaaccattcagaaaaattttggacttattttcgatatgtttaggggaaaaatatttgtgttatcattattttctatttacgtcctctcatcagcggctgaaaaaaatacatcattttctgcgctttttgcttttggtgattcagtcttagatacgggaaacaataattttcttcttactcttctcaaaggaaattattggccatatggtttgagttttgactataaatttccgacgggaagattcggaaatggaagagttttcaccgatatagttggtataatatcccaatgttgactggctttacttaactctacctataaagatctctcactgcacactttctatagatccgagactaataatcttgattaatcatattatttatataactaggtagtattctcatgtggtgaagtcttctattgtatgcagccgaaggtttacagatcaaaagacttgtaccagcttatagcaagattcgtcgcatcagttctgaagaccttaagactggcgtttgttttgcatcaggtggttcaggaattgacgatcttacatcccgaacactggtgaaagaaaaaaaaaacttaattgttatttcgataaacactatatattatatatctcaaacaatgttttcttataataattggatggttgtgggtggttttgtcagagagttttatcggcaggtgaccaagtaaaagactttaaagactatttgaagaaactaagaagagtagtgaaacgtaagaaaaaagtaaaagaaatagtttcaaacgctgtgtttcttatttctgaaggaaataatgatcttggatactttgtcgctcccgctcttcttcgattacagtccacaacaacatacaccagtaaaatggttgtttggaccagaaagtttctaaaagtaagacaacgtataataaaataaaaaactattagtatgaattctttgtaaatgttcacactcgctcttttggttttatatatctatatttgaaggatttatacgatcttggagcgagaaaatttgcggtgatgggagtgatgcctgtgggatgtttgcctatccatcgagcctcattcggtggggtattcggatggtgtaacttcctcttgaatagaattacggaggacttcaacatgaaattgcagaaaggtcttacaagttacgcagtagaatatgatttcaaagatgcaaagtttgtttacgtcgacatatacggtactcttatggatcttgtcaaaaatcctatggcctatggtacgtatatacacactccctatataaatatatgcatgacgtaaccaagtgatagtaatatgtcatttgttttatcttttaaaggattgtgcatcctaacaattaatgttttttttttctttctttgtgatcaaatttatatccgaatcataacactataagatgatcaagatcatgattctaattacaacaatacatatacttgcagggtttacagaagcgaaaaaagcttgttgttgtatgccgaatgcaataataccatgcttccatccagataaatacgtcttctatgactttgctcacccttcccagaaagcctacgaagtaatatctaaacctattgtctatcagatagcgaaaggccttgcctagctaattccttatttcctacaatgttttattataatctttgaaaattatcaccatatcgataaatatatgtaaatgtataagattcatgacaatctattcgtttttcttatagtaaacaatgtataattcaaattacaggcttttaaatattgtccattttatataacccaagaacaaaagtgtttgtttacaaatgtgcatcaaacagataaatccgggaaaggctatatatagcaccaattgcaagcttgtgaattcgattaatagaagttttgattcaagtaacaacgtgagctacgattgttcccagcaaatttattcaaatcaaaccaaataacaaaaaatatttactccgatccttcgggctaaagtgaattaaaaatctccgccctcggaaatatttttttggtatctataggtacacccatattccgattcttcactcgtgagtcgtgagcattatgcagacgtgattatataagatcaattagcatattttgtctcataagacattttacctattcaaaaaacaaaatcatgtaggttaatatttgaaacagacaaaattaaaaaggctgtagataattaaggttaaaatgcattaaggaaaacactaaagataattgtttttcttatatgattaaaacagtagatatgtgttacagaggcaagtataagtaggttttcgggaccagaggaagaagaaacgacgataatgttgatttacatttaaaataatgattcaggaaaaaacacttataaaaacacacagcataaataatcttttatttataaaaacatgtacatcaacaacaacaaaagtgtactgaattatttcatctcattataattaaattttgattttagattaaatgcggtggatatttgtttttccttagctagtgtcggaattatatatccctcaacaaactagagagtcgtataatcaacatacacaatatgtggtgggattaatattgcatgcatgttttgttaatattgcatagtcatcatatatagcaaaaaaaaaaaaaaaaaaattgtatagtcatgcgactcatgcctatcaagtctcctttaaatcagtagtctttgttttttcttctttcacacggattgcattgtttctatatccctttttcgttgttggaatacaccacttactactttttgtaaacaaaatttaaacattttttccttctcatcaaacgtctaaataaaattacgggaaatattaatctactaacaaattaatggaataatcaaatatttttcacaacacacttttcatctcctacgacattcccatattcattgccggtcacgtatgtgaatcacgtggcttaactcttcccgtattttacttcaaaattaagaactaataaaataaatacatactaatcgagtgtcttatagtctctatatataacagcaaaaatcccttccaacatatttgccatttacacttcttcaagttttccatatactaatggggaggtttcataaatttcctctcctaggtttagttctgttcctcggtctgaccggctcacttatcgccgccaatgagtatgcctgttctagtaccgatatacactttactcgtgccaatttccctaaaggtttcatttttggtaccgcaactgctgcttttcaggtaccacatatcacatatgcattagaattatcatatacattatagtcatagtttattgtatcgaataaaagttggtttagtgaagaaacttctaaaaataggtaccgatgtatgtggtaaactaaataggttgaaggagctgtaaatgaaggatgtagaggtccaagcatgtgggacgtatacaccaagaaattcccacgtctctttcactctctctttctcttttttttttttttaaattcaatttgacttaatgaaataatgtcaatataaaatcatctgttttttttttcccttttaaaaatttatttacagataaatgtaattatcacaatgccgacgttgctgtcgatttctaccatcgttacaaggtattaatcatgttatttacccctaccttatatgtgcttgtgaagcgatctcttgaaattacgttaatgtttaaatttatattcaacaggaagatatcaagttgatgaaaaatctgaacactgatggctttagattttccattgcatggcccagaatattcccccgtaagttattaaaaatctcaacaaattatatttcactggttgatcataacattagttgattataataaaagtaaggaaataataacattttttaaataaattaaaataacagatggtaggatggagaaaggaataagcaaagcaggtgtgcagtattaccacgatctgatcgatgagctcctcgcaaatggtaatttttgtttttcactacttaaacttcagaaactctaaattacatcaaaaacattactaatgctacctctaaatttattttcaaaattcaggtataacaccattagtaactgtttttcactgggacactcctcaagacttagaagatgaatatggtggctttttaagcgaccgcataatgtaagaattttttattaatttctacaactttatcgtctacaactcaaacacgattaaccttttctatatataaattcagaaaggattttacggagtatgcaaacttcacattccaagagtacggagacaaagtgaagcattggatcacatttaacgaaccatgggtgttcagtcgagctggctacgacattgggaacaaagcaccgggacgttgttctaagtacatcaaagaacatggagagatgtgtcacgatggacggtcaggacacgaagcttatatcgttagtcataacatgctcttggcacatgccgatgccgttgatgcctttaggaaatgcgacaaggtttctatataaacataaactagcctcatttaaattctattgtgaatatttttacgtagtttaatgaacgagtactacttataaacatttatttctaattgtttctagtgcaaaggtggtaaaattgggattgctcacagtccagcttggtttgaggctcatgagctctcggatgaagagcacgaaactcctgtaactggcctgattgacttcatattgggatggtaaaaaatatcatttactattttaccctttagtatcaaaatttaaaatatatgacaaatactattctgactccacaggcatttgcatccgaccacatatggagattatccacaatcaatgaaggatcacatcggacatcgactgccgaaattcacagaggcacagaaagagaagttgaaaaattcagctgattttgtaggaatcaactattacacatcagtgtttgcattgcacgacgaagagccagatccttcgcaaccaagttggcagagtgattctctcgtggactgggaacgtaagtttcttttttactgttttcttaatttcgatgcatatataatttatatagttagactattttcaatgttctcactttgattaattttgtttatacttattcctttttttccagcaaggtatgtggataaattcaatgcttttgctaacaaggtatactataactaattttgttattatttaaaatataatattgaaatactaaaattgatgttttaaaaaaataaaaataatactttctcttttttttagcctgatgttgctaaagtggaagtctacgcaaagggtttgaggagcctcttgaaatatatcaaggacaaatacggcaatcctgaaatcatgatcaccgagaatggttagaaaaacgtttataatctaatttagtctcaaaatcatataatcgatttctatatatctttcttttctttacttgtatataagtatttgagttttgaatatgtttgacgtaaggatacggagaggatctaggtgagcaagacacaagccttgtagtggcgctgtcagatcagcacagaacatactatatccagaaacatctcttgagcttgcacgaagcaatttggtatgttaaaaaatcatattttgagttttaattcgatgaaaatatgccaattattttcttcagatggactaatgttttttttgttcgtgtgttttaatgcagcgatgataaagtaaacgttacagggtattttcattggtcattgatggacaattttgaatggcaagatggatacaaggcgagatttgggctctactacgtcgattacaaaaataatttgacgcgccacgaaaaattatcagcccagtggtactcgagtttcctccacgatggatcaaaagagttcgaaatcgagcacgagttcgaacacgatgagttgtagagtgaattctctacaaacagactttgaaaatttgagtcatatatatattatatattcataaactatttgtttacagtttgctgcagtgaatgcatttccatattcaagtaaataaatcagatactcaatatacagacaagtaaagtttggattgtgttgtagtaagtatttggatagttgaatattgagatcaagggtattcacgaagattccgtactagttattgatattttctattgcatatttcatatttgcatgcacggcaaagtgccaaagtatatttattgaagaattcaaacagatggtcgtatgatccaaatctctaactattttaaaatgtgatatacctaacaatatactcaaatttctagctttctaaaagagactacaagtctacagactacaatacccatttaacatgttttggacttggttaccatatcttaaaattccaaatttatcggcaaactcaacgaaaataatcaaatgtataaatggacctgatagtgccattgatatttgggttctgacttcagatatgggccttggacctttctgataagactcagtatctttaagaagatacttgaatttggtaggtgagaatcatcatcctatcctccatccacggttttgtagagggtaatataattttttctatggacagtaagaagtgataaaaatataatattatataaaaatgttataatgctttttttgtatgacacatgtccattttaaattacaaaaaaccatgtaaataaagaataaaatacgttataactaaaaaaactgaatgcatttcaaaaaagttaccatataatcatataagtaagcatataaatcatacaccttatcttgatgtatatgattagttataactagaaaagaaaacaaaacaaagttgaatattatatctaagaatatatattacccattaagaaataaatgaaagagagaataaaatccacagcattatataaatattgtagccctgggagttcggatatatcggtttaatcggttcggtttatttagtttttcggggtttttggattttttaatttctagccgaattgaaccgaacaaaaattcggttcgggtcggttcggacatcggttttttcggttcggttattgggtataaattaaattccggattaaaccgattttttttctaattcggttaatttgaaccaaataaaccacaaattaaaaaaatggacttacaaaaatgaaatctaataaaaaacaaacaacaggcccaatacacaaatatacagttacaattacaaatccacaacacaattatgggtcaggtccattacaaaattagggttttgagttttgacaaaaaaaatatgtacgactacaactccaaactgcgacgtcgagcagtgcctctccaatctagtgatctaccattccgacgacgtaatgccctacgagacctgttaaacgcccgtttgttatccatgaagtaagaaaaaacatgagatggaagtgtaaaccataaaagatccataaaaataatggataatctcagatttggaagtgtaaagcctaactctaaaatttcagaaattatagagacagaggaagagcttagagagcaaagaatcaaacaaaacaaatgattaaagagaaataagaagagtttaccctaagaaagttgaggttgtgggttgaatctctgagcaaaggttttttgtaagaccaactgagattagagagaatgaaagaggcttggaagatgatgaattcatgaaggagaagagacgagttgatgattactaattcaatcgaagaaaaatatcaaagtttctttgttgttttcgcaagaggcagagagccaaaaacgaagaagaaacctaattaggttaagactcatcaattaaccttatatatggctgcagattctcggtatgggtgaaaccgattggttccgattaccgaaccgacccgaaccgacttccgaattcttaaattaatttggccgatcggttcgatctccttaattcggttgctgccgaaaaccaaaattttcgtttttttcggttcggttttctcgggttgaaccgttatcccaggcctaaaatattgtatgactcttgaccaaaaactagttagatatattatttattatgacatattaatattaacttaatataaaataaaaataaatgttcaaaaaacatgatcttaaagctgacaaagctgatttgattgactaatacttatcctacggtgatttttggttcttttactttttttgacaattatggagctggatggaaaaaaaatatatataaaatcatatattattaataatgagataaatacaacgaattaaacggatcaaagttaatatttccaaaagaaaaatagaacagagtcctaatttcattaatttcaactattgaaaacaaaatttaaaatcaataggattgatttctatttttcttttagaaaaacaaaatttgaaacaatttcctaatttccctaaacttgcgactttttaacaatcgaccgacttatcaaaattagggattgttttatatataaagagagacgcatctctttatttcattcatcgcttctccaaaattttcttcaaagaacaaatctcccaaatctaaaatctttctcttctctcttcgtttccataaccatgtctgcgaagaagattgtgttgaagagttccgatggtgaatctttcgaggttgaggaggcggtggctctcgagtcacaaaccatagcgcatatggttgaagacgactgcgtcgacaacggagtccctcttcctaacgtcacgagcaagatcctcgccaaggtgatcgagtattgcaagaggcacgtcgaggctgctgcctctaaggccgaggccgtcgagggtgctgctacctccgatgacgatcttaaggcctgggacgctgattttatgaagatcgatcaagctactctctttgaactcattctggtatgtttcttctctcgatctgatttgatttttccatcgaattttgaattttgggattctagggttttcgatttgggaaaattagggtttcgaaatttaggtgtttgtttcagaaattgaatctgcttgagattgatattgttagggttcttatggaaccaatcattaattgaatctatcgatttggattataatcatatctgtgtttttggattcggattttgatctaatggttatgaatttgggatcttgtgcaggctgctaattacctgaatatcaagaacttgcttgatctaacatgtcagacagttgcggatatgatcaaaggaaagactccagaagagatccgcacaacgttcaacattaagaacgacttcacaccagaggaagaggaagaggttcgcagagagaaccaatgggcttttgaatgattgatcttcagagagaagaatcaaaagcagcaagcaaccagtttcttcttccttatgtttattgccgttttcaagtgttgttgatgacttgctttttaatattcttcatgaatcatgactatcttcttcctcttctttctttcttatcaagaaccaatgtttcttactctttgtgggatggataatttgtgcttttagataatcttcaagagtgatgttggtttgtcttacaaaataacttctttcaattgtcttgccaatcgccacagaatgctaatttgcacgattcattttaggaatgttcatgtgtaaataaaaagaaactgaatttggcagagtctgcaagcagaatgtgaaggatcatgacgactactcattgaaaccaatggtcaccagttatgccctgctcctgctcatctacttacataaatatctgcatcacgtatttgtatcttgtcaacatcttctcaaatactaacataatcagcatcacccattcgtcaacattcgataacatgtgggctttgtttgcatataagaaaacaaagtttccactcaaccgaacgtggatcacatgtacatcaatataattactttaattgtttgtctggctagtcaagtggtctctcgtctcgtcattgtgtatcttatctttactatgagactgaaagagatatcttctttatatacagtaacactcacattgtggtcactcgaaaagagctaaagaaaatggaagatttgaagccaagtgccgctaactcgttaccattgacactgttaggctttcttgagagagcagccaccgtgtatggagactgtacctccatcgtttacggcaattccaccgtgtacacatggcgagaaacgaatcaccgttgcctctgcgtcgcgtctgctctgtcttccattggaataggaagatccgacgttgtctctgtcctatctgctaatactccggaaatgtacgagctccagttttccgttccgatgtctggcgcgatccttaacaacatcaatacccgcctcgacgcgcgaaccgtctctgttcttctccgccattgcgagtctaagctgctcttcgtcgacttcttttactccgatctcgctgtcgaagcgatcacgatgttgctcaatccgccgattctcgtcctaatcgccaatgaggaggaggaagaaggaggagctgaagtaacggagcgttcaaaattctgttacttgtacagtgatctaatcactagagggaatccggattttaaatggatccgacccggaagtgaatgggacccgattgtggtcaattacacatcaggtacgacgtcgtctcctaaaggagtggttcattgccacaggggtatattcgtcatgacgcttgattccctaaccgattgggccgtaccgaaaaccccggtttacttatggaccttaccgatatttcacgccaacggttggacctatccatggggaatcgccgccgtcggaggaactaacgtctgtgtgcgtaaactccacgcgccgtcaatataccatctaatccgtgatcacggcgtgactcacatgtacggcgcaccaatagtgcttcagattctatcggcgagtcaagaatctgatcagcctcttaagagtccggtcaatttcttaaccgccggttcttctccgccagctacggtgcttctccgcgccgagtctctaggtttcatcgtcagtcacggttacggattaacggagacagccggtgtgatcgtctcctgcgcgtggaagccaaactggaatcggttaccggcgagtgatcaagcgcaattgaaatcacggcaaggagtgagaaccgtcggatttagcgaaatcgatgtagtggatccagaatcaggtcggagcgtggagagagacggagaaacagtcggagaaatagtgttgagagggagttcaatcatgctcggatacttaaaaaatccgatcggaactcaaaattcgtttaaaaacgggtggttcttcaccggagacctcggtgtgattcacggggatggttacttagagattaaagatagatcgaaagatgtgattatttcaggaggagagaatgtgagtagtgtggaagtggaggcggtgttgtacacgaatccggcggtgaatgaagcggcggtggtggctagacctgacgagttttggggagagacgccgtgtgcttttgttagtttaaaacccgggttgacccggaaaccaacggataaggagattatagagtattgcaaatataaaatgccacgttacatggctcctaaaacggtctcgtttcttgaagagttaccaaagacttccactgggaagattataaagtcattgcttaaagagattgccaaaaacatgtaaaagtattgtaattttgatctaatatcagatatgtcatctctttcattaagattaatcatatgatcaaattaattgaaatcagtctctttcgtggccgcatatgtctcagcatcaaaagaaagtggtttatcacaaaaaagaaaaaaaaaaagagaacaaaaagctccgttaccgggaatcgaacccgggtctcctgggtgaaagccagatatcctaaccgctggacgataacggattgatgttgtattatctcatttatacattattatttcaacactaagtctggtattacagggttttggcatggacgtcgtgaaatatgcaagctcatgtcaacgatgcaaatagcataagcttttgggtttttatttagagctatattaattgatatgcatggaagatgaagaaattaagaatctatgcataaatattagttattttggtaagtatgaaagataaataatatataaactaaaaatatctttttttacattaattacaaaaatgctattgaataaaattaattgtaatttgcggataataagcatatagctatttgtttaacgtgctaaaaactgtgatatcacgataaatttataaattatttgttaaaaaaatagttatcgatttaaaattgtaaatctttattttttatttatgtatattcaaaacaatagaaggaaattagactttttcttacataattaagatgataataattataacaacatgatatatagaataataacatgctaacatattatataacggaataatatttatataaaaacgttaaaatatttgatatatgaataatatttactctaacatataatttatacataatatttttcaataattgttaacgaggataacctgataacaatgaaaatatttagtaataaaaataagatgtgaaattttatttaaaaaacaaaaaatacaaatgtataataaagtaacttcatcagttattttactgttgaaatagtcaacaattccgccacctaatttttcagtcttcaggacatatttattataatttctcttttatttaactatgtagtatgtgagttggcataaacaatatttagaaatccaaagacatgtagaaggtctacaatagaacaaagattataattgttttagtaaccacaaacgacataatattttagtaacaaacgattgatatcaaacagtcaaactctatcagtctcttcattatggtagcagtatatggagcctcattggatttatccacctctcccatccctggcgttttctcagcttgttattctgcacataatttaatttcaacattcagtaaatattagtatttcatgattatctatcttggtggaaagaacataaaacaaaaacaaaaacagataaagttatagaactcttgttacgtgtgattattagtaaattacctggatttcaactgtagctgatgatttcattgaacgcaatatcaactcaatatcattagtcatgcttttgatctgattttttttattttttatatttttgtaaaggccaagaaaaaacgattaagattattattatccactctatttttcaaaaaaataaaatattcactaaagttaacttactcttggaaaatctgtaatagttaaaatattaacccatccttgattatccatttgagatctcaagtactcatcttttgccaaattatcatcgctgcattatcaatgaaggtaaacatatcctaagaaatcaataaacacaaaaaacaaaaaaaactttaaagtaaataaaccaaaataaaagtttatttacctaaaataataatcaatttggaaaacgatgaaagaagataaactggaacatgctgctgacctaaaatctggaagatgtgctaaatctgttgctcacaacttacataagttagtaaaaaactcaagagtaatgataagaaacactagctaatatatataaaacaaacttaataacaacttaccaaacacaggtctataagaaaactgctgaagaggaaaacatggtttgatagaaaacgtttgtgaataattagacattatagccgatttaatccctttgaaactgaactttgattctaattagatggtgtggaaataatgtttctcgatctcttgaatacagggttgagtcacgttgtttatatagtggtctgctttttttattcctaattaaatttcaattaggattttaacagaaaaaacaaacaaatatctatatgtatctagttgatttaatctttgatcaaaaaaaaaaaaaaccctgttatatagtgtacacaataaatctatatctagttgacttagtctttgaccaataataaaatacataaaaaaactatagaatacgctgaaattatagtttgttacagaaagaaaaaaaaagaaaaagaacagctttaaagttaggcctgagcataatacctgaacccgaagaaccgatccgaacccgacccgaaaaacccaaaccgaactcgaacccgaacttttaaaatattcaaacgggtctaaacttcaaaacccgaaaaccccgaataagtacccaaacatatctccaatataagtatatattaattatatttatacttatatatagaaaagattaagattttttggatattttagttatttttgtatatttttaaatatattcaaaattactcatgttgttttggaaattttgaaattttcaaataatttaatagatttacatacaaaattttgatatttcaatatataaataaattcgaacccaaacccgaacccgaaccgatcccgacccgaaatcttaaattacccgaatgggttttaaatttctaaacccgaaaaacccgaacccgaatacccgaacgcccatgcctattcaaagttatatagtgtagtctcgtgttttctaatacagcaatgtaaaaaggtttcatgaagaacattgcaaaattgtattgcttgcaaaatagttttgtcagccaaaacacaacacaacagttgataaatattgtagagcttcaaacgattagactgcaaaagaccttcaaagttcttcaccaaatttgacttatgcctaacggccctaatcatcatcagcttcagatcataaagacatttctttcttttctttatattcctccagagttatcagtgactccttgtttttggtccaatctgcaggtcttggcataattatcgcaatatacccttcgcggtcagcctgaaacaattagattttataagaatgggaggtgatcaaaatacagaacatcatcattagctttatcctactcatgtataaaagcaaggaaacgatgatcaagttatttaagttatccaactgattccataagcaaagttcttgacattaagagtataacataagagctcaaattgttattgaaggtacagcaacaatagagactcatagcaaaaaatgagattttcattggtttttgaggatttgttagagaagccaattttcctctcttattacttaccgttgaattaagaagctctggttgcttaatcaatctctcgttgacctccaagagagagcctttaacgcagcacctagcaaaaaccaattcagaacaaagacaacttcatttttttgcaaataagaacttaggacaaaggaaagtgaaaacagaaaaaagctttgcacacctaacaatgtaagtatcttttgcagtggaaactttgcacaatgctgtattcgattcagagcgcaacgcattctacacaagaagagcaagtaaaaaacagtagctaaagccagaatctagactcaatcaaagacaataaacacacaatttcgaactgcaaaacttcaagctataacaattactaaaagtctaagactcaagaatcaagagaaagccacctttttacgcttgccggagactttcaagacgctacgatcagacttaccaacattgaaatcgacactagtgattccaccttcatccttaaaagctatatgcgtaggagccaatccaattacacacaaactatcaaacaaacaaacacacaagtaagaagaaaaccaatttcatcatttcaacagcaaaaggaacaatctttgacatacccattagcgtgacggtaaatatattgatcatgacccgatttagtaaaatctgcaaaaacattgaaaagggtttaattcacttcacactatcaaaaggggttttgaaaaacactaaacagtaggtgaatctgagaacctgtgatgaagtaagaaacaaaattgacttgtgtagctgaaggaggagaaatcggaagttctccaatatctgaaagcagaagctttctcaattcgtcttcctcttcatcttcttgtgtagctagctgctgcttctgttggtcgtcgcaatcttctacttcgtcgtttctctttgggttagttaattcgattgtatcctcaatttctggaaacttcgctacatcaagcttcagaatctccattgtttcgactgtttaacctttgacggcgaaaaaacaatcggagttacttcgccgatttgtaattacataactaatgggcctaaaggcccatctactgatcttgggtttgaatcatgttcatgttcttctatattactaacttcacttcttcagtgaatttatttaccagaattttgatcccaatgtggacttgtgataaagtttgagattttgttttttcataaagtaaaagaactgatgtgcataataacaagaaaaagtcagataattcaaaataacaaaagtgttaacagacaaaaacagtagaatttgaaacaaatctagaaatcatcatcgtcttcctcagccatgtatttagcgagctcctcttcttgctgtttcatctcccttcttttctcctcgctctctttctccctgtgcgtgtttggcgggaacctcagtgctctaaccgcttcattgtgcatattcaaacagaaggcaatcctcgagttaaacgcagtctgtggttcattagtggagtagatgtctcctgtttccttggagaccatacaaccgttcttgtggtcgatggttgcgtcgattgctccatctctaatggctttagcgacgatgctttctgcatcagccactgggttcgctgagttcagtctcagcttttgagcaacatcctgtagagagattctggagtaggaaatgctgatgttgcgcagtcctgttctgatcacgttgtgtcggagtctgactatgaggttgtgagtcctgtcttccgcaaatgttttggcaaacttctcttggattttcccgaacagctccaagtcaccaattctcacagccttacaaaatttaaacaagagtattagcaagaaaaccttaattaaagcatatgttagaaatgtaaaaaagattgaactcacgttggtcagctcaaaatatggcctaagagtcttctccattcctttctgagtgaagatagatcgttcaggtatttcacccaacaacagccgaactatgatagcccacttgttgcactggattctgaatcccagagatgcaacaggtgctttcctagcagcttggaggagactctcttttgcatcggtgtactcaagttgaatcgtcctgatcttgccaaggtaaaacaagtacctacaaaactgtaaatttatataacgagatgagtatcgtttctagttgaaacatgtgaatgtagtttggagaaattcacagtgaaaagttggcattagtaagcatcagagaggttggcataagtaagcatcacaattaacttagaattagaaactagaatgtatgaaagggttacctgttggttagagtgtgcctcaaatcgaggcgcttttgatctcaacttctctgcttggtcgtacaggttgtagtgtagataattgcgaagcaacagattcaaaagtgtttcctggcccaattcgtcgtggcgcagtgtggccgaatggtgaagagcaagaagagtactgcaacagaaagagagacaagttaataagataattgagtgttgaactaatatgataaaagttgaaagatgactgtgaacttgtactcacctacgtatctctgcaagatcattagttagctcgtaacttaaggagtagtaaaaatacaatttggaagcaatgacatcaacggttctcctgtttacgcttttgaggcgagcaatgctagcggtagaacaaactttggcctgaaagcaaagaaagtaaaacaatgaagaccacagcaagatttataaataaagtatgtcagttagagagatagagaagaagtaaacctcgttgtactttttctgatcaatgagaaaaagaagaacaatgaagtagcagtaaatctcgagctctgcaggtagatgcttaggaggagcttgggaattcgatgatgctgtatcaacttccatgtcatgttcatcactctgtaccaatattataaattccatcaaattaagggcaaacactaatacatgaatctaattacagatcctagataagctcgtaatcaaagtggacaagtgaagctacacataccttcggcacaaaagaagagagacgagtgtgagcttcagatccaggaaccaaagcgaaatcaaggaaagaagagatcacggaacccgtgagcttccttcgtagtccaacggtgagacgcacagcacgagcaatacgacggacttcctttgtataagatccagtatcaatcagagctgcaatctccttcaaatctggagaaaaaaaaaagcagtacaacgaattcaattttgaaacaaacctagcaatgtgagattaagagaaactgaagcataagatagagatttactctgtagcgtggaggtaggagcagagacgacggattgcgttggggtttggttatctttcatctctacgtcctgagtcatctttttcgcaaatctcaagtcgtcttcttcttgacgaaggtaaattaaaaattgatttgaaaagagcagggcttaacgcacacataagtactcttatgttttcctttttcttttcctagacagaaattaccaaattatatttgggaaaaatgttgttttatacgcgaactttcaaaaagtagctattctatacgtgaactctgacgtcggccaaaataaacatgaaaaatacgttgaccagccattttaacagaaacaaaatgttgacctcgccaaaatcccgagacgttaactcgctgattaaccccgttaagagaacgttaatgaattctgttaagaccaaaacgccgtcgtttcaaacctaacgaaacaaatcaaaatgcccaaatcgaaaactcaatccctaattctctcaaaccaaatccctaattctctcattggtaaaatcgtgtttgttcttcgattaatcttgttgtgattgccttagcaatagaaggcgaagtcgacattgctcctgttccaccacgacgagtagctgaaaccggagatggagtttgatggtggagttctagctttgccggctgttgttgtagcagagtcttctgtcggagttgaagctcaaagaagatagattgagagaagttggatataagaaatcgatttggggaagatgaagacttagggtttgagttttcgatttggggattttgttttgtttcgtttagaacaaaacgacaccgtttcggctttaacagagtttattaacgtgctgttaacggggttaattgggtctgttaatgcgagttaacgtctcgggattttggccaggtcaacgttttgtttctgttaaaatggctggtcaacgtatttttcatatttattttggccgacgtcagagttcacgtataaaatggccactttttgaaagttcgtatataaaacaacatttttcccaattatatttttccattttatttttttctttcccttgaaggcagatattatcttgtttgttaatactattaatgtcattaattagaacatcaaagtcgttgtagtatagtggtaagtattcccgcctgtcacgcgggtgacccgggttcgatccccggcaacggcgctaacatttttttatcgagtaaatctattgttaatacggtgtcgacgagtctatgagcttcctttcctttgttgtgtctgtctcattagaattttgaagatcaacccaaattcgagaatcgatggtttctggctttctacttccattttttttctctctctgtgtaaatctgcttccatttgtgagttattttcgttataatgttatataagaattcaactttgcaagggtacttgttggaaataaaagaatcaactgttccatcacattaaaactgataaccaaagaaaagaggtaatttgtccaaactgtgtctcactctcacctaaacaaaactacaaaacagaggaaaaaagaaaagaaaagaggatgcctcagtagttcttctctaacaaaaacccaagacgacgaccaaccataaaataaattgaacatatattcctaagcgactctaaacaaaacagaccacaagctaaaacactgtcaatcaatggatagtaaaaaaaaaagaaggggaatgagatacacttatggcaaacatgtcttcttgatggacagaagaagcaaacatagaaagaaagtgagagaacaaggagatagaaaaaaaacatccaacgacttgggcttttttcttctttttatgtttgtgtaagagaaacctcactctcaagcagctgcctggactggtggtccatctgatctgttgttgaaaccaccatcaccaccacgtcctcctcctcttccacgtcctccccttccacgtccacgtccacgccctgcatcaaaccaattcaaaactcatggcttcttcacacaattacagttcaagaaccaggtaaaagaatacagaatgttttaatttattttaccacgaccctgaggaccatcataaccaccacggccctgagaaggaccatcataaccaccacggccctgagaaggaccatcataaccaccacggccttgagaaggaccatcataaccaccacggccctgaggaggaccatcataaccacggcgaccctgaggaccatcgtaaccaccgcgaccctgaggaccatcgtaaccaccacggccctgaggaggggcatcataaccaccacggtcatcatatccacggtgttcatgaggagcatcgtaaccgtaacctccatcttgtggtgcatcatactcattcggaggaccattgtatcctcctcttccacgaccacgactgctgcgtcctctgccacgtcctcttcctctaccataggactgctcacgttcccaacctccatcttcatgctcaacgttcacataagcatttcctgacagcaaaaaaaaaaagactttattcatgaatcatatgttcaaaatcaatattcaacgttcactaagccagatgatctatgtagggcatttttaaggtaatctaacctctgccacctcgcccccttcctcttccccttcctcttcctcttcccctccctctgccaccaggtgaaccctctgcaagaaaagtgaaaaaggacactaataaagaaagcaagtacaagggagattcagaataacacagagagtgttgttgacaaacctcgtccttcataatcaatatcgcccattggcttcaccaactcaataggaattgggcactggtacctgaaagatcatttgattagaattattagaataagaagtctaaggaccacaattgcttgagacataacgtatgaatctaattataactaaggaccacaaaagaatcattcagaaacatcaaaacaaaacacgaactcacccaacagaggaggtattaagctcaatcttggatagggtaatggttatcattgacacatgccttgtagtctccaaacttcaagacaaaacaaaaagaaaagaaataagtaaagtttgctatggtgacaaaacttgaaacagtagaacatattaaaaatgagcttttataaaagtttttattggccccttacggtagaaggccttcctctgttggttcccatgtgtctgtgatgtctgtggatccaatagatgtgttctgatgaagatcagggatccttctctgcaatacatattaaaaagggacattttcaaacacccatctgaacaacacttcgtgaattggacagggcaaatctccaaaaaaataccttaatcagctctacaatggtcacagtcttgttgatagctcttcccattgccttgaatacaacttcagttgaccctttatcctatacaaacaaaccaaattctaaataaaattgttcaatcaaaaagcaaactcatgttcacaaaacttctagtagattaacataaatgaagtaacaaatctaatcatttttgaattcatattaataactgtaaagtataacgcctagattacaaaatagcttataataattgatctcaagattcaaaacttcttaataccaattgacaaaaacagttcataaaccctaaaccatatctcccaacacgccacaaaaaccaaacaatgaattgtaaattgacacatttcagattcattgaatacctgaagaagagtcatcgcataggtgatgtagtttcgtgccctgccttgactagtgatacgaatctcattcgcatcaatcggcgtatccgctttcggcttcaccactcgttgatacttatccatctgaatcaaccccaaaatggaaaatcaatgagaaaactagggtttttgtcgaatccttgtaacaaaacacacagagacaaaaaccagtaaaaggaataaaatcgggatttatcttcaaaatttcatcatagcttgatgcttttttaccttaaggagttgttgtggttagatctttcgaaagagacgaagattgagataaaacgaaaatggtggttttgttgcccaggaagagccctcgttgtacggctttgtttcttctccttgatacgccctaagggaagaagaatttgatgcaaagcctctctgatatatatcagccgcactacttctcttccacacacacacgttgcactaccctaatcaggtttcggttcaagattttgctctaaaccaacttaaaccgaaccaagataattcaaactggaccgatataataaccgtattaaccacctccatcttcagtcgtaaaaagagatttgatcaacgattagctgttattcgttaaattagatccagtaattaaggttcttaattgatatgtgaccgggaatgttttgtatatcggtttacattgatttttcggtttagttgtgcttttttttttctgtgagtgtaaagtccaaatttcttgtaataaaatcttcaagatagattatccagttgcacaaaatgcgaaggaaaaagtctaaatggctttttcagaagaaaataaaataaaattaattgtttagatgagaaccaaatctacacgttattaatagacaaaatctggattttcggtactaactagtactattaaccaacgaaaagacaaatttgtagtttaattttaatatttggagaacgtgtctatgttatctctatgtttacttattagttaataaagattaatattttataccaatatttagtaaagtattttatacagaatttcgcgaaaattttatgatcaaaaataataattgtcaaacttcaacaagaaactgagatctatgttttcttaggagaaaagaaaagtaatgtctctttgaattttagttaccatataattgttgtaaccatccataattacaaaataaaatattgttgggagtcttgacccaacaaacgtgagaagcatttaagtttgttttgtggcacaatccaaaacttgaaacaatgtaagactaatagcataactaattaacgatgtaatgatgacataatcaagtaaaatttccattaattctgtattaatgatctgaaaaataatgtaccttttgtcgaggtaatatattcggctgtgaatcagcggaaatgtattaacaaagctttctcacatgatcacacttcctctcacgtcgttaacacaaagacagatggaggattcgtttggttcactactactaaaacaaaagtaggccacagttttaagatatggataatttggtataaaagtaataattttatttaaataaataccaaaatcgggtttaacaataaatgtatttttcaaaatattttattttatcacattaatatagtgtagagctcaaactcaaagcaatagattcattatacgtaacatgtaaattttaattttattgccatgtattacaatttctgtttaataaatctgggctggccaacttttatatggatcactttcctttattacaaatttacaatgagcaacatacaggttttgagaaagtctatacattacagatagtattataccatgacaattgacacagcaaaagcacttaaaatcttcaaaggaagggaatgaagttatcttccatctcatgtgcttgaaccagaggatcaatgattttcttccatcctccaaaatttgaaggggaagcagcatcagacaatacaaacccgttaacgtagaaggttggtgtaccataaacccctcttgaagcgctatactgcaacacacaacgccacgaaagcaaaagatgaactaaaagtcactattgttcgttttcagaaaacaacgagaacagcctcagggtactatcgacaaataggtcacaaaattatacttgataggtaaagattcaggccattaaactctgtattcttctattgccctgacatcactcattttcttgtgtgtgatatagatgcaaggcagtataataagatgatgactatgcagccaatgaccttcctgtaagaaatttaagttcctaaaggaattaccttgaaggaaactctggttgcacgatccgattttttgtcgctgaagccggatttaagaaccgattgatatgagttccccaacgagactgttccaagttcgactattttctccacaactgcaggtcttgaaaggagttgtgtttgcgcgttgtaaaacaatgactgccaaaaaaaaaaacagtttcagtgaaccagataaacattattgaatacatgcaaacaataaccagcaactgcagataaataaacatatatacctaagtttttagtattaacattgaacaaacctgatgcttgaagaacccttccagcaaactgaaggtagcattggcgtgtacggtattcacaatgtgtaaggcccgtgatgttacataggcattgtcatggtagctgcaatttccaaaatccaagaaaaaagattcaatacaagaacgaataatccgacataacacaaaggaatcattcacatttccatggaacaaatcataaaacagacagtgaaacatattttaaagtccagacctttcttaagccacttgtcgattgatcaatacatgaattaagctcagagcaaagaatgaaggcaaagagagaattttagatcactgacggtaaaggaaggagatggaggagaagggcaacgcgagatccatagtgatgaagagcttgcttcagtggcggccaagagtctctactgtccgggcaaaccgggtcaaaatacgcctcaattagtatagtatccgggtcgaaacgatgacccggtgggtaaacgaaaccatcttgcctcaccggcggcactagctgcgcttgtactctcgtctcaacgacgaagacaaggaacaggagaaccgctcgaatcattattctctgactcacactttttctctcttcccagaatcgccggagatgattaaaacagagggacggtgtcggtgagtatacgcaacggctacgattactcggaagctaagcgagacagttacctctcctttcatctctaaccgttgatttcaattatggtgacgtggcagaaaacacaatctggtaatgggccatatttgtaatgttatagagtttggtatttaaactgtaattacacgtaaataagagccctccctctacaaaaacgatagatttgagatatggtccaactacgttcacagagagactcataaaccataactctctctccctctctccctctctccctctctctctgctcgaatcgaaccgttcccaggtatgtgctttgttgatttagatcatcagaaaattctattgcgtctctttccttgtaccaagttgtttcactttcaccggattttctactttctgcatccgagtttctatgattggatcgaaatttgaatttccattgattttgaattgcggactgcgtcgttgattgatttcaggagctgctttgatttggtttatcgttgatctgtgaaaatggggacgaatgatctcgacatcgaagaagggactctggagatcggcatgggtaagtcaccgatcatggatcacactatattgattttgtttctagttcttcctctgtttttgattgtgttgattcagaacttatcctccaaatctgggtttttttatagggatattctagtactctggctctttttgaccttgctgatgttgttaactatttttctttagtataagactgattcatgaatcttttgaattgcagagtatagaactgtttctggtgttgctggaccattggtcattcttgacaaagtgaaggtaagagcatcgtttgattcattaagcaatgctaatttactttgtgagggtaacttaactgactaaaacttcttggaatgtaatgataaatcagggtccaaagtaccaggagattgttaatattcgcttaggagatggatcaacgagacgtggtcaggttttggaagttgatggcgagaaagcagttgtgcaggtttaggattgttttttgtccatgttacttcaaacattgaataatacttaaacacaaacttcgtgaatctagtcacttcttcagtgacttacttatcacttaagggtttcaggtttttgaaggaacatctggaattgacaacaagtttacaaccgtgcaattcacaggagaggtaatttaccataaaaatccttcgtccctccagcatttcgcagatttgttgaaatgattggttgatttctgcttcctgcattttttttaaaccggtttgtgtctttcaggttttgaaaacacctgtatcattggacatgcttgggcgcatatttaacggttcaggaaagccgattgataatggccctcctattctgccagaagcataccttgatatttcaggtgagcaactaagaggacaattattccattgagatctctgaagcaatgtttcatttgttcttaaaaatgtcaattccttatattgataggaagttcaatcaaccccagtgaaagaacctatcctgaagagatgatacagacaggcatatcgaccatcgatgtcatgaattccattgctcgtggacagaagattccacttttctctgctgctggtcttccacataatgaaatagctgctcagatttgtcgtcaggctggtctagtcaagcgtttggaaaagactgttgatctacttgaggtaatcctttgtaacttgtacaaatatatctcttatttctctataccaaagctcttatttgagttgtaactgtttctacaagtgtgttgatggatgtgtggttacataaaggtcttcattattagatgttctaggcttataactcagttgttgtcaaaattgaatttcttgtttgtagacattcctcttcaacgttggctgtctcataatatcaaggattctttctcattcttgtgtttttccaggatcatggagaggacaattttgcaattgtgtttgcagctatgggtgtgaacatggagacagctcagttcttcaagcgagattttgaagaaaatggatcaatggagagagttactcttttcctgaacctggtaaatttgacttctatagctgattgccatatcatggagttttttcaagtatttagatgtttcttagctttaaacagatttaaccttcctttattccaacaggccaatgacccaaccattgagagaatcatcactcctcgaattgccctcacaacagctgaatatctggcttatgaatgtgggaaacacgtccttgttatattgacggatatgagttcttatgctgatgctcttcgtgaggtaaaatgaatatttgataccggagtagttcctttatttcataccatgttttttcctcttcatgtttgataataagattgagaaactgtaggtttccgctgcccgagaagaggttcccggaagacgtggatatccaggttatatgtacactgatcttgcaactatttatgaacgtgctgggcgtatagaaggaagaaaaggttccatcacccaaattccaatcctcactatgcccaatgacggtaaaatcatctttcttaagccaatccctagattctattttttatcttgagaaaactcaattcttactcgttgttgtttgacaaattgatcagatatcactcatccaactccggatcttactggttacattactgaaggtcagatatatatcgataggcaacttcacaacagacaggtaataaataactaccgctgaggccctgatcttactggtttcagtaatattatgatccggctctgaatgaatgtatctttgtttcttccctgaaaaacagatatatccacccatcaacgtgcttccatccctttctcgtttaatgaaggttagaattcaactccattttgattaatacccattgcattctatctccagatcttattaacgtattgtttctcattctgttagagtgctatcggcgagggcatgactcgtaaagaccattctgatgtgtcgaaccagctgtatgcaaattatgcaatcgggaaagatgttcaagcgatgaaagctgttgttggagaagaagcactttcttcagaggatttgctttatctagagtttttggataagtttgagaggaagtttgtgatgcaaggagcttatgatacacgcaacatcttccagtcgctggacttagcttggacattgctccgtatcttcccacgggagcttcttcatcgtatccctgcaaagacacttgaccaattctacagccgcgactcaaccagttaaaatgaggtaatggaggttatcttatcgaaactcttttgagagaaaagtgtgaatttttgtgatgtgtattatttggtgcttattataaagaggaaaaacaaagaaaagctatatattctgtgtctccctatctggtgatattttttttggttctgcattgtgttccaaagtggaaataaaaatcgataaacgatgtcgtattgtagtactttccttttctttgtatgaatttgttaagattggtttataaatgggattataataagtatctttaaaaaagagtgtaattagtatctttaaaatttgcagttagtattgtggaaaacaatcatgatataattgacacgatagaccaccgaaataaaggaatcaattagattagattattgaactaaaccgagttttgtccattctccaatcaatcgcaatcttcgttatctataatcaattaagtttacgcgttgattaatctttttgcaaaggaataggagaacctagagagaccccctccaaggggctacatagtgggaaaataatgataccctaaccttctctaaacgctaaagcaaagcactgatgaatcccctaatgattttggtaaaaatcattaagttaaggtggatacacatcttgtcatatgatcaaatggtttcgcgaaaaatcaataatcagacaacaagatgtgcgaactcgatattttacacgactctctttaccaattctgccccgaattacacttaaaacgactcaacagcttaacgttggcttgccacgcattacttgactgtaaaactctcactcttaccgaacttggccgtaacctgccaaccaaagcgagaacaaaacataacatcaaacgaatcgaccgattgttaggtaatcgtcacctccacaaagagcgactcgctgtataccgttggcatgctagctttatctgttcgggcaatacgatgcccattgtacttgttgactggtctgatattcgtgagcaaaaacgacttatggtattgcgagcttcagtcgcactacacggtcgttctgttactctttatgagaaagcgttcccgctttcagagcaatgttcaaagaaagctcatgaccaatttctagccgaccttgcgagcattctaccgagtaacaccacaccgctcattgtcagtgatgctggctttaaagtgccatggtataaatccgttgagaagctgggttggtactggttaagtcgagtaagaggaaaagtacaatatgcagacctaggagcggaaaactggaaacctatcagcaacttacatgatatgtcatctagtcactcaaagactttaggctataagaggctgactaaaagcaatccaatctcatgccaaattctattgtataaatctcgctctaaaggccgaaaaaatcagcgctcgacacggactcattgtcaccacccgtcacctaaaatctactcagcgtcggcaaaggagccatgggttctagcaactaacttacctgttgaaattcgaacacccaaacaacttgttaatatctattcgaagcgaatgcagattgaagaaaccttccgagacttgaaaagtcctgcctacggactaggcctacgccatagccgaacgagcagctcagagcgttttgatatcatgctgctaatcgccctgatgcttcaactaacatgttggcttgcgggcgttcatgctcagaaacaaggttgggacaagcacttccaggctaacacagtcagaaatcgaaacgtactctcaacagttcgcttaggcatggaagttttgcggcattctggctacacaataacaagggaagacttactcgtggctgcaaccctactagctcaaaatttattcacacatggttacgctttggggaaattatgaggggatctctcagagcaaagcacccccacaaaaccaaccaaaggcaacattatttttccttcttttaaatttcgtttctgttgcctatatttcaaagaaacatccaacaaaaagacaaaaaaaatcacagaataagaccgaagagtcgaagaccgatctactttgctcacatgcttcaaaaccaacataaaacgaccaaaaaccagagaaacaaaaacattggaacaaaatattttcttagaaaaaaaattatgggattttgcttctccaaatttggcaaatcacaaacacatgagatcccaatctcttcctcttccgattcaagccctcctcatcactaccaacctctccctaaaccaactgtttctcaaggtcaaaccagtaatcccacctccaatcctcagcccaaacccaaacccgctcctcctcctcctccgtcaacatcctccggttcacaaatcggtccaatcctaaaccgaccaatgatcgatctctcagctctctacgacctccacaaagaactcggccgtggccaattcggaatcacttacaaatgcacggacaaatccaacggtcgagaatacgcctgcaaatccatctcaaaacgtaaactcatacgtcgcaaagacatcgaagacgtgagacgtgaggtcatgatcttgcaacaccttactggtcaaccaaacatagtcgagtttcgaggcgcgtatgaagacaaagacaatcttcatttggttatggagctctgttctggaggagagctttttgatcgtattatcaagaaaggaagttactctgagaaagaagctgctaatatcttcagacagatcgttaatgttgttcatgtttgtcacttcatgggcgttgttcatagagacttaaagcctgagaatttcttgcttgttagtaacgaagaagattctccaatcaaagcaacagattttggactctctgttttcatcgaagaaggtaaagtcatcctctttgattacttaacttaagtgtcttgttaactcttgtttcaaagatttgtctttgcttttacataaagtaattagtgtgttttaggagataaaccataatgtttaaactcgtgttaggatcaagaaaaagatagcgacattgtatctccgtgtgggacatcaagtcaacttcgaaaacgacttgggtcaactcaagtcaacagatgtttcccacaagatcaaaaaagtgacaaaaaaaagcagaaaagcagaaatcattttatgggggattaatattcttttgaacattttgattcacaccaaaatatcaaaagacttttgagactggagagctgtattagaatttgaatatgtttgaatgcatattagctaaaactttggttctgtattttgaaatccgtacaagtaatcatcttatatggttaatatttgtaggtaaagtgtatagagatatagttgggagcgcatactacgttgcacctgaagttctacatcgaaactacgggaaagaaatcgatgtatggagcgcgggtgttatgctttacattcttctcagtggtgttcctccattttggggaggtatgcaaaaaatactgaatcatctaaaattttgtaatcacatactcaacttgaagaatgttggagacatgaaccttaatttggtactacttaatgttgtttagagaccgagaagactatatttgaggcgatcttagaaggaaagctggatcttgaaacttctccttggcctactatatcggaaagcgcaaaagatttgataagaaagatgttgataagagatcctaaaaaaaggataaccgcagctgaagcacttggtatgcttgcaatgtgtataaatttgttacatattctacctcctgctcctaagtccttactaaccaatcttttgttgtggatttttatcggaaaaaacagagcatccatggatgacagacaccaaaatttctgataaaccaatcaatagtgctgttcttgttaggatgaagcaattccgcgcgatgaacaagctcaagaaacttgccttgaaggtaaagtaaatgattctccatctccaaaatgacttcaagatcaattttgtaattgttttgtaattttctttgcttttaggtgatagcggaaaacttatcggaagaagagataaaaggattaaagcaaacgtttaagaacatggatacagatgaaagtggcaccatcacttttgatgaactaagaaacgggttacatcgtcttggatctaagcttacggagtctgaaatcaaacaactcatggaagctgtaagaaaaaagaaaacaaatccaactacaaaataaatcatcatcaatatctttctcaatggtttttctttattcataggctgatgtggacaaaagtgggacgattgattacattgagtttgtaactgcaacaatgcatcgtcatagattggagaaagaagagaatttgatagaagcatttaaatacttcgacaaagacagaagcgggtttgtattcttctaaccatctccttcttcaccaaaatgaacacaactactttatatatcaaagatatatggaattgtcttcaaaacatactcttctttttttttcaaaaaccagttttatcacaagggacgagcttaaacactccatgactgagtatggcatgggtgatgatgcgaccatagatgaagttatcaatgatgttgataccgacaatgtaagaaaaaacatttatttctagttgttttgtttcggtctaatgatgaatgttaaacaaaatgattaataatgatgatgatgatgattgataggatgggaggataaactacgaggaatttgtggcgatgatgaggaaaggaactacagattcagatccaaagctgatcagatgatatatattcaactacagtgacgaatgcttttgcttcatatataataattaaaataaactaataataaacacgaatgcaatgagaattaatgcattcctatgttttttcccttgagatgtataaataataaatatgatgaattgcgtaagtatgatgaatcaaaaaataaaatgaaacttatggcccatttaaaatgagatgttttaattattcacgcgaacttatggcccatttaaaatgaaaaagccttttaaggcccatttataataggttcagaaacttgaagctttgtttatttattaaacggcatcaaaagaaagagtggcaaaccctctattttatctagaggcttttgatttattttttcagagaagccaaactaagattttgaagttgacgagtgacgacgatgctctcaatctcgcagctgccgagtttctcgttaaccaccgccaaatctcttcgttatccttcttctccttcgtcgtctctctctatcttcttctccttcttccctaaggtttctaatttcgtcagagcaagttccggaatccccaatttggtcgcctgtagtccgacagagattatcatccccagagttaataacgccggactcagaatcgaggagatagtagacgccgcgaaaggcaaaattcgtcttgattcatggatctcttctcgtatcaatggcgttagccgagctcgtgtacagtcgagtatacgattgggactcgttaccgtcaatggtcgtgtcgttgataaggttttaacttcaaaattcgattcttcaaaaaagtttcaattttgcaatcaagtttcaatctctctcactctcttccaggtttcacacaatgtcaaatctggtgatgaggttaattgtacgatatcagagcttcaacctttgaaagctgaagctgaagatataccattagatatagtttatgaagataaacatgttcttgttgttaacaaaccagctcacatggtaaacacattctctcaatatactaacatcatgacttagaatcatcactaagaatatctctccaattcttaggtcgttcatcctgcgcctgggaatcctaccggcacgcttgttaatggcatacttcatcattgtagtcttccttgtgttgattattcgaactcagaagaagatgatgattccgatgaagaaacattttcagatgatgaagagatgactacctctcctagttcatatgctgcttctgttcgtcctggtattgttcataggttggataaaggcacaactggattgctcgttgtagccaaggttagttcaatgctgctttaggaactactttaattgcttcttctgaatttaacggaaagtttaatggcaggatgaacattctcatgcccatttagcagaacagttcaagctacacacaattgagagagtatatgtaagtcttactactggggttccttctccaccacaggggcgtattgagataccgattggtcgtgattcgagtaatcggatacgtatggctgctattcctggaggagtaaggggtggaagagcccgccatgctgctagtaggtgatgagagcagtcttctgcaagtgcaccaaccactataacactgcatttattcttcagaatgagaaaaatctctctgaaagagttgttaactgatactgatatatgctaaaaaaatgctcttttatgttgtcataggtataaggtaatcgaaacattcgctggaggtggctctgcattggttgagtggagactggaaaccggccgtactcatcaggtactgcaacattgttcagtgtgaaaatctgtccagatgaaggaatactctttgttgaaaacaaaaaacaaaaaactgaaggaatactcaaaatctataaaagtctacggttttttctgtttgtaagagcttgagctgccctttatgtttctgcctcaagtcatgtatttgatccagctgctttgaacttgtggtctctgaaacgtctctctcttccatcttgatttcaagtagatacgtgctcatgctaaatatatgggagttcctctattgggtgacgaagtgtatggtggaacaaaaagcatggccctttctcttttgcagaaaagagtctcccgcagcgatcaagaagagatcatagagcttatttccagaatggatagaccttgccttcatgctatagttctcgggtaagagaacttaaatctcattcttatattttcgatcaagaataaccaaataactgtcctttcttactctgttttccttgatagctttacacatccgtgcactggggaaatagtaaagttttcatgtccaccgccttcagatcttgctgagatagtaggcttgcttcgtagaagcggattataaaaagtaacccaacactctctgcttaataaataacctcatacattggaattctgatttcgttacaaagcttttggttatactgaaacatctaaactcttgttattgccttcttgcaggtaaattaatctctcgacttgcacatcaactgactgtgcagaccacgagacatgtcatctaaacaagggaactcatctttcatactctttcaagcaaccaaaatcatacttctctcaggatgattcttgacgaaacaaaagaggttacagaatccagttttaaaatcaacagccttgtttatagctctgtggcagtgtatacaaactctacaatgacatgaatgataatttcagaaacgaagtgtgtaagttgtgcaagtgaattacaacactcaaacatcaaacccaaaattctgtaagcacgtttctaaatgatctcgcttcttcttctggcaaccattttacagcaagaatttcaaacaccaaccactttaaactcgatgaatcattctgttgaaacattcatgccctatgatccgtcaaatcagcgttgatcaccacggcgttgtttctcaatcatctctctttgcttctccgcaagcttatctaaagcagacgaaacggcgtcgcttccacctatcagaagccttgtgataacctccggatccgtctcaaatcgcgccgcttcaaactccttcctcgcgttctctctcaacacgtccctccataaatttcccctggaatcaatccacgtgaagaaccgagtcgctcgtaatatgtctctgtacaaactcaacgcttcccggcgcgtgctcgtcagacgccgtctattcagaaactcagcctcatcgtgatcgattattggtttctctttcttcgctagatgtctttcgagaagctcctccacggtatctggaccttcgtgcaggaaccgcctcgtcgacacagcgccgctccgattcatcagatctagacgacctgccagatttcgccatttctgaagcttcgcagccatcatctctctcaaacaacaacattgaaaattttcgatcctggtgacaacaacaacaatgcttgataacataatgggcttcgatttctgaaactgtataagcccagttaaagcccaatataatcattaagttcgcaaatgttatacgtctctaataagacgacgacggatttagataaaatttgagcccaaaacgcaccaccactcagcgttttagacctgtcttctccagaggcagagaaggagaagcttcctcatatggcgttcatagccgaagaagccgtttgtctattccttcctctgaatgcaaatcatcatgactcatcccaaagatgagaatttgaaagatgctataaaggttttactatgcttatacgaaaagggttcaaatagacaattttttacgtgcattgagaagaaaaggatgtgattgttccacacactgaaacacgtgatacgaagtgtaagtctatatacagcagatgggtatggatacagaacgactaaagatgatgtattattgtcattgaataactatatgagaaaccaaatgttcttttaccttctgcagaattgaatgtcatgcactgttaaactcttcaaataaaaagtctgatcagctttgtgtttacaactctttcttgcgtatcttctccatctttatagatagttattttcaacgatcagcatcctattctctaatacctggatttgtgacgtttttccccaacaatgttacttctattttagtgatgttctcttgcaacccatcgagaaagggtttaatcttgcatgataagctttgtggatgggttgcagcagaagatgactacaacagaagttatattgttgggtaaaacgtcaaaaagaacagagttcttaaaaccatcaaacaaatccaggtagaagagaaaagtatgttgctcattgaacaatatcaatcaatagagataaagaacatatgcaagaaaaagcctaaacacaaagatgaccagaatttctatctgaagaatcgagcattgcatcacattcaattaaagcagaagaagtacaaaaaaaaaatgttaatggccctgcatatccaacatctcatcaagtcctttgattctctctaaaccttcactaatcagataccgaatcttttgtttgtcattgcagtctctgttcttttccatctcttgcctaacagtctgtttcagttcccctacaaaacatcaacacataaaatcaaacaaagtttatcctccgaaatctactaaacccctagatttcgagatttttaatcaaatggatgtacggtgaacgcaaatttattgtctatgtgacgaatctcatagatagaaaaataagagacatgaaagacacgaacctctaacatgaacaggagctctgtgagctatcttcaatgcttgtcggtaaagtttaagcactcgagcccggagaataaagctctgcagatctaattgaaccataatttatcaaccaaccgttgaattaagaatttacggccagagaaggatcgattcagaaagaactgaaatcaaaatcgaaatctagggtaagagagaagttcctgactctgagtcctgagttaaaagaaaaaagatcggagaaggaaagagtcacgtgagaaggacatgatgaagaattaatgaaaatatgtggtttaagtgtaaaccggtaatcggtgttaattgaaatcaaattatagtttaccaaccatctttaataacagttctgttttagatggtcctaattacggaagcccatccgaaccatcgtggtttaacttacagcaaacagataccaaaattaattaggtagctttgaataaatattaggtggtttagcatcgtgtttccataatatgattttctcagtgtacagcttcgcaatttctcaattgtttttggtccattttcgtttatttaaaatcgtttactagagttgttcgtcccttggttgactaatattctaccttttttttttaatttctttgaagcacgaaattgtaaacacaagatatcaataatttagacaaggtctcagtaatttaatatagactacgtaggatttaaaatatagtttcgataattaaaagacaatcatttaccaaaacgtgttactgaatgatttgtgttaatattattatcagaattcaaacatgcaagtatatgaagaagaagtatgtttatcgattgaaatacattgtattttttttctctctcttaggtgtttcaattacagaactttaaatgctaattaacaaaaaagtaaaatttcataaagctccaactagttcaatgcatcgttgataagttctaacttctaccttccttccgatatggctgaattttgcttgcatgtaggtcccaaatatcaccaccgtttcttaaagaaatgttatactattttgatttttggactattgaggcacaaactaaagtcaaattagtaattaactaatcatcatctttggaaaataaaaaaatgtgccgtttagcttttaggtagtagtaacaaaaagaagaaacttgaaacaaaaacaaacatgtcttccgcattttgattttataaagtcggccgtataaacacaaaggtctttcttcttcctttttagctctcacatttgaccaaaactcctccaatccaggcatcatcgttgactttttcaaactcatttcctctctttttccttcttctcacatcatattagacccaaacataaaaagaacgaagaatcctctgttcttgtctgcgaattttgctgttgtgatcagcgatggacattaagcatcatacttcaacttcaaaacctaagaacaagaacaagcttttgaagatgcttcctaaagcgatgtcgtttggacatcgagttccaccgtttagtcccggaagagatctccaccacaacaaccaccataattacacggcggctaacaaaatgtttttctctggtcctatggttcctttggtacctaacgcggctcgggttagaagaaacaaaagcgacgctgtttgggacgaacctacttcacctaaagtctcttgtatcggtcagatcaagctt

SEQ ID NO: 137 - DNA, 87684 bp, Arabidopsis thaliana
gaattctttgttgttcataaacttgattgaaatgacaacactctggatattgcagctgaaaactggagcaggagatttccttggatatgagaaggggattgcccacctcagcaaagctattcatatgtatcctcatagtaatttgataaggtgggttttgataaagcgctctaggttttaattgtgtaatgatatgttggtatcgtaatcgtaactcggaaataattttttgttggaattaggaacctgcttggatatattttgttagctggtgaaggaatgaaagatgcatgtactgctagtagatgttgtatcataaatgtctctgagtgtgcaaataaggaaggtctgaagtccgcattggaggtccttggtggaggatcagttgcttgcaatgtaattggcaatacagctcctaggttctcatttccgacatgccattgtcagtatctgaatgctcctgttgttgttgtagaattgcaaaggtatttgagaatctttctacatcattttagcattttcagaatctgaattgatttactctcaaagtggtgtctagtcgtcctgttatcattgacaactcaatttttgatccactgtgctcagaatctttcgtatatgacagagagctaagagcataatactacagaaaatatctacacttaaacattttttaaattgtttttcaatacgcagattcttgcatcaagaaccttcgaacagcagtgtaagatacttgcttattctgaatctcgtgcagaaggcacgtgagcagagatttcctcgccagctttgtagggctattgagcgtctaatatctgtggcactctctgatgagacatgttcgaaagaaggcgaatataaaaaattccagcttctgctttgtgcttctgagattagtttacagatgggaaatatagcagagtccattaaccatgctcgaaaggcttcttccctttctcttccaagtagctatctatttctaggacatttacaactttgccgtgcctatgcagcaaatgggagtaccaaaaacatgcaagaggaatacagagcgtgtttggaactcaagactgactcaaatattggttggatttgcctgaagctcatagaatctcagtataatctggaacctgatgctaacctcttagagatgagcctacaagaatgctcgagccagaagaagaattcatggaaagaatggatggctgtatacagtttagctcgtggcttagattctacagggaaaaaagactttttctcagcagaggaattccttgcacaagcttgttcgttgttaaattcagagagctgtctacttctctgccatggtgctgtctgcatggagctggctagacagtctaatgactcgcagtttctctcactagctgtaaaaagtcttagcaaagttcaagcgagttcattgtttcctttgcctatcgtttatacattattagctcaagcacatggaagtcttggctctaaagagaaatgggagaagaatcttcgtctggaatggttctgctggcctccaggtttgacgaaaaaactgttctaatcattgttctttcatatttcaccagaattgcataactgaaactgtttttaattgttggacagaaatgagacctgcagaagtttacttccagatgcatatactcgcaagacaatcagaagacagacctgaaaccacttcagggattgaaaactaccaaagtcctgagaaatgggtgattagggctattcacactgatccttcttgtcggagatattggaaagtcttggataagcttgttcaacatcccatgagctgagaaaccaaaaattgaaaatccaatcccagaacagagaagaagagcccagagcagaacagttggtgttctgtttctttccttatagacatgtagttgttgtgtaacaccaaatagaaacacaatggaataggattcatcatgtacattgaaactgaaacaagatgcagttctttttaatgaactatgattttggataatataaaacatgtttttggatattgcttgcaaagccttatttacacagcaatcaaacaaaaactatatagaacaaacaacaaagcttagcgcatcatgagggcgaactcatcaaagcttagaactccatcagcattgagatcaaaagcttgaatcataactttgcaatcatcagtggttctagactcaccaagcttcattagcatcatcttcaagctccccggagtaatgcaatcttctccatcagcaatgtacattctaaaagcttccattatcttcctcttcttttcttcctcagtgaattcatcattccctttgataagcagagcaaactcattaatatccaacatcccatcaccgtctatatcagagagtttaaccgcagcctcggcttcttcatcagacatttgctctcccaacgtcttaaaactcttcttaagctcctctgcagagattctaccgtctctgtttgcatccatgtaagcaaacacagcctctaagtctctgttcttctcctctaagaatttcatgaaagatgaagataactgacgttgagtgttcttcattttgagaaagaaaagattgtatttgttataagttacaagtattgttctttctttttttgatttaggatttgaatgagaaatggtataaagtgtttctctatatatataggtgtgtttcaagtcgagaatagtaataagaaaatagaaattgaaacgaatcaaacgtgtgagattcagatctagaaaaaaaaaacaaatatttttagtctttagatctagaagaagtagtattattagtcttctagatctagctaggaaaggaaatattagtatattggttcgttacatatctcatccccatgtttaaaacacgttttcttcttctacctctctgtcttaaatataggaagaaggattgagaaatgttattgtggtaaatataatatttgacgactcccatttgttgaatttagaacaatggtaacttcatctactaatcattgctttttttcaaaaatcaatttcttcacaacctaaggtttcataccatagaagtccatataatgcctcaaacttgttatggctcctataatttctccaacttgggttgattcaaaacaagtgataagtgttagaaatcctacaaccgaaagatgaggtcaaatagtaagattcaattcattgacactatggattattgtcggtaacttagtgagattcagtttgagatggatcgataaaagccaacattcttcttcacaaaagtgttaggactctaacaatatataaactcttattggttggaaaaaaagattgttttgtaggaataaaatcttattagataccttaattgttaccgttatgtgaagatcttatactaaagctcatttgaatcttgtttagattccttttgtcttgaattgtgagctctagagaataataatatgactatgagcaaatcatggtcaaacctcaatggactatatatttagtagattgactctttcatgttaaaaaaacatcttctctaatataacaaagtttcacatatggatccttaatcaaataacaatcgtatttattgggtcacaaactattaaattatatacaataagagattaaataaaagaacaacaacaacaacaacaacaacaacaatggaggcttagcgcatcataagagcaaactcatcaaagcttaaaactccatcagcattgagatcaaaagcactaatcataactctacaatcatcagtggttcttgattctcctagcttctttagcatcatcttcaagcttcttggtgtaatacaatcttcaccttctgcaatatacagtctaaacgctcccttgagctccatcttcttctcttcttcgtcatctactttgattaactgagaaaattcctcaaaatccaacatcccatctccgtccgtatcagacaatctaacagcagctacggcttcttcatcagacaattgttctcccaatgtcatgaaactcttttgaagctcttctggtgagattctaccgtctctgtttgcatccatgtaagaaaaaacagcctctaactctctgttcttgtcctcaccattgctactgttatgttgttgtatctctccggctgaatcttccctctttggtgatagtttccggcaaagtttcttgaaagatgattgaggttgagtattattcttcatgagagaaaaataaatggttaagtgtattttttgtttgtcttgttttacttttgaaatgaaaagtgaatgagaaataggggaaagggcttttatgttttatatataggcgtgtggtcaagttgtggtaatggaatgggtattttcttgaatcttgaaaataaattaagatcaagtgtgtgtgtgtgtgtgtaatagacgtggtagattagtgtttagatattttggacttttattttaatgagttttcttgtataaaacacgctttttcttcctttttaattggatgacgatcaaattatggagaccaccggccacttgtatttgaaacttgcacacgagatttttaacggtgggcgcttggaagcttcacttccttcgtcttatctatctctctctctctttcttgtttctttctcaatataataacaaagacaaacatttgtttgactatgtgtacgaatatcattggttggaaatgaaatattatctcctgcaaaccaaggcacacatagaaatagaagccaacggttatgaaattttaccaagtgatgatacttcacttgattttaggaattctcttaaattcgagttttttagttgtctttgtttccaaattcaagtttttatttgagaggtatgatttacgctttaataattattgtcaactttttttttttttttgccaacggttagtcccggaccgagaaagaaagattatgagccaacgaaaataaaattgtttgaaacgtttcttaattagtagtagtgtttttcttagagatttgtacaaaaaaaaaactaaaaagtacgaattttctcataagagtactgttaaaataatcacatttcagtgctctttctataattattttgtttctttaattaggggttaacggtcaaaaaaacggtcgcagaccagagaatttaaggcaatgttttcttaattaagactaagtcgataggtttaattcttaaacaagatataacgtaacgtaagcaacgtcgacaattcaatatctaatctggcccaataatattgacctaatccggtccagcaatattctagagaacgagaaactcatcagatttttacttccaagtgttttctacaagttaacatattttgtctttgtttttattttgattctaataacttgcatctttttaaaagtaatcttccattaaattataaaggcgaattaattgacgtttaccatttgcaaatagtttgattaaaaatacaagaattgaattgttttgtttggagataaacacattactagaacatgtcaatgtagacacaactaataatacataaaacataatgtaaaactttagtgttgatatagaaaaatcaagaattaacaacattcacaagttctccaatctaacatcttaagttgttgttaacaaatgcattaaaaagagactaaagaagctcaaacagattggtgcaattagataaaagatggggtcttacaaaaaagccatgtcaaactaaaaaacaagcattcactttctcacccttgctctcttcttatatataacatcattctactaaaaaaccatctgtaattatatttatatatatctatatatacttaaaaactagacttcttatctcaagagttagcatcacaagatcaactttttagaccttagaagactttaagaacagatcaggctttcttcttcttgttgttgttgttcttgatcaggctttcctgtgtctgttctctctgctttcccttaagcttcttcctcttctgtactcgacctctgcatcagagcttgaaatatgatagcttctgcttccttttacagaccccactctcgacaataaagcctcttcatccgcatggatccggtttctttgtttgtgatctgagccatacaatttgatacaattagcacacacacaaagaaacaatgttattatctatgcaagctgaatgagatataatgtgacaattctcacctttgtagctatttgatgactttggtgattggaagtctacaacttgtgaatcaagatcggcttctgatttggggcttgtttgactcagcaaatttgcttctcttctgagaagcttttgtccatcgcttggagagtaagctgatgtgttaaaagacccatccatcacatcagtgatctctacatactgactagttgtgatgatttcatctgcactaaaaccaaaggacgccctgtaagcttctaactcctccatgtcttgcttgggacttctgttctgcctattctggttcccgtttccatatccatttgtaggatacacatctgaatccttcgacacgcttaatcttccaccgttttgaggaactgaagggtcgtgatccaggtaaaacttggcaaaagtttcaggacagaagaagtttgactcctgcaaaggtgttgagactccatttgtgtcatacccgaatgtgttgccagaatcactccttgagcatttaccattttgaggcgacaataacccatctcccgaagcccgagagattggtgatctaagagcactggctggacttccgggataaagagaataagtagcttgaagatcattgtaatgacctttaccagagttcttgagatccatggaggaagtcaagaaacgagcataaggtacatcaggtgaagaaggggcagtcagacgtgcaagctctggaggaggagtgaaaggagcagtcgatggctcggtggtgaaagtagagaaaacaggcggtgagactaattgggtttcatgagcatatggtccagtggcatacatactcgacgaaggacctcccggtgaatttgcagccagagataagtagcagtttggagactgagtagttgaaggaagagctgaattggtgaaggaagcaggagaggaaggtggagccaatagtgatagattaatccctcctgcagcttgattatttaagacaccagcttgatgagctccattaggttgtgaagctgagacattgccaccttcaggaatgcgagaagcaggtacaattctttttccacctttttgtgacttgaaacaagagaacactcctaaacaacctccccaccttttcctctgcaaaaggacacacacacacactcagacacttgacatgtaagtgtaaaagagatctgtgaagcaagaagataattgccatatagtgaatcaatgattatggatctaaagcacgaaatggtgatcttatagcttacacgcatcgaatctagatcataaccagtaaaaggttgaattttttcttcttctaattgaatggcaattcagaaaaatgtaaaacttttttgttcaattctcaagaatcactagctcgatttagcataaagctgggatttttacaataacataatgatcaaaggagagattcaacataaaccctaacgaacattagtgtgaacagagtcggagtagtcagatctaagtaggaaaaaaaaacaacttgccaaaaaaacgaaagctttaaaatctgaagaagttagaactgagacagagagaagtaaaagctcaagaagtcgaaatcaaacgaaaatagagagaattaaacagaaacctgatcctgctctgagcccatttaggtgtctctctctctgttagtcagaaaaatcacagagttttactcttattctgagtagggtttcttcaacaggtcatagacgtaatcatcttggttttctccattttttctcacaatttcttcttccagtttactgatacgatccagaggaggagcaaacaaaagttaaagcaaaagggtgaaaaagattttaagtaaagatttttggggaaagaaagacaaaactaattttatgagtgggagtgggagagataaagaaaaaaatggaaatttgagaagagaaagagtaaataaggaaatctgcactgatgcaatcggcatgaaaagatgatccttaccaaggaaaaagcatttctattttaatcagaatgtgacttaccacaaagcaagagcaaaaaaaaaagacaaaacaaaacacaaaaagctcaagccaacacacacaaaaaaaaagacataaaagagaaaaaggaacaaagaaattaataatgttttaaatctcttcggttttcacactctctgaaatagcagtaaaagaaaaattatgagttttggaaattaaattggtttggaaaaaagaggtttatcaatgtgtttaagttggttattaaatgggtaaattacttattagacatctaaacctattaaaaagttgattcggtgagcacgtgaaggacgtttactaataagggttaagggagaacatgtaatgtaaaagtcaatttttttagtttttgcttttttggtttggtctataaacacgtccaaaatcagtgtataactgcttagtcaagcgaccattgaggtttaataataaatgctatacacttatcaagaacaacaagattgttgtgatttttttttggctttggaagttgacaaaacaaacctttgattaataaagagtttggaacaaaaaataagaagaagaataaagtggcaattaataaagaaatttgcaaagattagtgacacaaatttgtttaaaatttgatcatattgaggggattatatgtattaagatttaaatttgtttaaaattgatcatattgaggggattataaaaaataaaaggtgattcttttccctaaaattttgttttgatctttatgaattgtctataggtattgagggttccaataaagacattaaagcagaggaaaaaagagggcctagtaatagtatggtacctagttgtaggatttggatcttttttggggtctggtttcatatttgtaggacctctctcctcctctctcattctttcctcatcttaattaaccctgtatattatttatttttaacttaaaaagccagtaatttttcaatgttcccaatcacaaactattgacaaaattatttacagctccagtgaaacaacaacctatcttttactttaatcattgcttatagctttaaaccacatcacatgtactttcttgtatttttaaacacacatcacatgtcctgactcatgacctgagttatgctcgtttccacaaaattttagaaactggtcattgttagaaatttcaaatttgtatgccattgaatcatacatatgatacaagagatctgttttggtagttcatagacatatataatcaaatgaataaaatcacatgcttcagttgacatttctgtttactttactatataggacacttactattcaaggacgggccttcttctcaagcaaagaaggatttatgggctttctgaaaagcccaaaatgttctaagacatatataggaagtggaaagaacaaagtaaatggcacacaaaggaaatatttgtataaagaattcgaatcagtagcgacgagtaatttcaaatgggttataagcacccacttatggtttagtgtcaccgagttcaacgtctttcaagtcgatatgctcaactccttctttgagtagcttaatctcatcttcggtcatactgtgtttgccgtgtggcgttgactttgcgttcctctgtttctctatatcaacagcccaactatagatcaccattccaacaatggctatggccatcccggcgatgttcttgaatgtcatctcggaatcaaagagaagccatcctaatgtgaggacgcatactgttttcatgtggcctagaacttggaaagatgtcgctgagaatcttccgatgcagagatattggcttatgttacagaaaacggctaatgcacaggagagaagaatgcagaactgcaaaaatgagagataaaaagtaaagattttgtgtttacgtttgagtcatctgaatcatagagaacttgagaatttacttacgatggcaccataagtcatctggtaagtagatatgaatttgccgctcaacaaatagtcaacaaaggggccacagatgagaagtgaaatggcttggattggtgcagttttgctcagcaattcaaaggatcctactgagtacttcttctgcagagagcctatagactgtaaccaaaagaaaaagtgaaaatttgtcagcagaacacttgacacgccatagtatctaagaagtttcgagagaaaaatgccctttccaggactccagcaaggaatacagaactgtgtctcctagatttataatttcgaattcagatctggaaaggaaatctagttgagtttacgttatgcaggagaatctgtgtacaatactgagttagattagacatagatggagctcaaagggacaaaagattccctccaaataccactgatctaagaaaagtttgagcctttctgtttcaaagaatgtaaaaagatgaatactgatctaagaaattccagatctaacataaacaaagagatggtgtgatgaatacttacaatctgctgcagagaagtggagaaaacggcagtgcatgcacaaatgaaacctttggcattaactttgacatcagtcacagtacaaatcccaacaccgataaccacaaccattacagaagctttcacttctttacaataatgcttgctatgtagaatccattccaacacgcataccaccggaatcatgctcaatttcgaaatctaaagtgaaaatgaataagcaaaatcaaaacaacaatctttcaatcgaataaccgaaagagcaaatctccaagacaagttacctgatagaagccaacagagttgagcataagactaaagttcatagcagcgatagagatattagcaacaattgagaaccagagaagctcccaaagaggaacatgcttagaagctgatagtcccgttgcgtttgacaccataccaacaagagcagtgaatgcaaagtgaaatcccgttaacgttgtagctgtggaatatataaacaaagaaatcgtcagattcatgaagtgtgtaagctaatgggagatagatagatcagagtcagagagagagaggcataccaaagccaaaaccgaaaccagaggaagacatgagctgtttattagccatgatgattccaacggagctgattacattcatagcccatgcaccgacatcagacaccgccgatttcttctcgctctccggtttctccatttggatttgagaaaattgaacaccgacactatcagatctgaatctcgtgcaagcgaaaacgagatctgagaaatctcgattcgcttgcagattttgacagaatcaaacactgaaagagatgagatctggagaaaagtcgattcacgccgttcgtggaatcagcgaagaaagccaaaaagcgaaaaacacagacacacactcacgtatctctctctgtctctgctacttatgcttcactggttcttcactcgacgtagctgaatatattatcacaagcaagcttcttctcccaccattgatgctttccttggagttgttataaattcttttttaattctctgagatttcgaaaataatattatatatattaatggaatcattttaagtattaatttcattcattgacgcgtgtcgtttaccttatttgaccttcttctttcttcttttggtccacttgtttgttatttcaatatgagttctgtatagggatagttttgtcttttcgtgccgctggtaacgtcgtgcttttagttttcaaattaaattttaacttgcgagattattttattaaacgtttacttaagtgcttaaattaagccacaaggaactgataacagcgaattgttaacggtaatttataacggagtacgtacttactacttaatttcaaactatatatttaatttagacaggaaaatatcgcgatgtgtaactaatagtaccatttgattaaaatgtagaaatgtgttgttcattttcgaataatgcttgattttattataatcatatcgaaagtgaaaggaaataatcacaatttgccattggtcatagtcacaccgtcacactcaaagccaaacaatttcgaaactaaattattgagtttgtcctttgttcttccagctattctttacttgattacagtctcatttatatatacaaatgaaaaaaaaaaatcattacaacaacaaaatatcgtttttgttgtgtgtttgtatatcaagagttttggaaattgtactgtgtgttttatcgaatagttttagaaataatgatgggtctctgcaattattaatgctttgaagatgacaaaacctgtatatcttagcctgtgcctcaacacaaatagtaattgagaacacatgatctccaacacattgtcacaaaagagcttttgcatgtgctttcaacatcaattattttcttctaacaagcccaatttcacattagtttatgccaaaaccgaaaaaaagagagaatagttttacataatggcacacacattaaggggtttgaatggacatacatagaagaagccttggcttataaatcataacttatctttcgtgtattttcttggaaatatcaagtggagcttttgatgccataggatcgatgatcgcatcactgaaagaagatgaagaaaaacaagtaagcaccgacggaaaggaccgaacacttttgcaccaagaagatacatgttacaagacaaagagaccaacactgagatatcctgacttctccacgtgcatcatagctaggcgctgtgctataccagtataccacttagcactttaataggcctctcccgacacctgaacaagagaacttgcttagttgaaaaaagtacacaaaacaaaacgttataggccgacaagttttaggaattttataactgggctcataacataaacaaaattaaggcccaaatctgattctaacaaaaagaaaagagctctgtctctttcaaactgttgcaaagtggcttctgtagtttgttcctaaactagtcaagcaaggtgggctaacataaactcccaaaatggttggtttattacttctgtttgatgtgataatgccgcaattcaatgtgtattatgtctcttgaaatctttcatttgagtctcaattcacattcttttgattttatctttccttctttactatgttgcatatttcagagcatataattttttttttttgtcggtggtcaaagtttataaaatcaaaccaaataaaagaagtgattgaaatcatacgagaccccactggttatgttctgtataagcgccaatgaatcacaaagtcgaatcggaactgtagatgataggaaggaacaaagaaaggaatataggttaagttcaaagtggttaagctctctaatgtcgtcaatgaatacgtcatcatgaagaaataaataatttccaagtggatggacttggggaggtccacacatacgtcgtcaatgacgaccacgtcccttaaggcgaaataaacacttgccttcctaaattctctgatcaatcaatgtgtataaatatgcgcagatatatccattatcctccacaattcagggaaaatcttcaaagtgtttgcagagaaatctaaattcatcaacagttttttacaaaagaaatggaaaacggagaagcaaaacagagtgtacctcttctcactccctataagatgggaagattcaatctttcccatagggttgttctagcaccattgacgagacagagatcgtacggaaacgttcctcagcctcacgctgccatatattactctcagagaacgactccaggaggttttctcatcactgaagccactggagtttcagatacagctcaagggtaactcaaaaacccttccttttgattaaagtttacgtttttatttgtgggtttttgatctgatccttaccacatgtgtgtgatttgatcttgaagatatcaagatactcctgggatatggactaaagagcatgtggaggcatggaagccaatcgttgatgctgtacatgccaaaggtggtatcttcttctgtcagatctggcatgttggccgcgtttctaatagcgggtttcagccaaatggaaaagctcctatctcttgttcggataagccattgatgcctcaaattcgctctaatggcatcgatgaagctctctttacccctccaagacggcttggtatcgaagaaatccccggcattgtcaatgattttaggcttgctgcaagaaatgctatggaagctggtaagcacattttggatttggaattcaagaagctgaaaccattcaagattcttatatgtgtccttgttgttgcaggttttgatggagttgagattcatggagctaatggctatctgattgaccagttcatgaaggatacggtgaatgatagaactgatgaatacggtggatcattgcaaaaccgttgcaaatttcctctagaaatagtcgatgcagttgctaaggagatcggaccagaccgtgttggaatcaggctctctccatttgctgactacatggaatctggagacactaatccaggagcattagggctttatatggcggaatctttgaacaaatacggaatcctctactgtcatgtgattgaagcgagaatgaaaacaatgggagaagtacatgcttgtcctcacacactaatgccgatgaggaaagcgtttaaggggacttttatctccgcaggaggtttcacgagggaagatgggaatgaggctgtgtcaaagggaagaactgatttggtggcttatggtcgatggtttctagccaacccggacctgccaaagaggttccaagtggatgcaccgctgaataagtacgatagaccaacgttttacacttctgatccagtcgtcggttacaccgattaccctttcctcgaatcaacagcttaaaattgttatcaataatgtaatgtagtgtgtttcccttatataagatgtaataagtttctggcttttcatttatactttttaagtttaagtcataaaaccttcacaaaaatttccacggacacattatcacaaaagcgctttctagagaccaacataacttaacttgattgttgatttctgtttgatgtgatcatgccgcaatccagtgtgttctcatgatgctatcttccctcctttcacatgctgcacagaacaaaacagagcattttcctcccaactatacctaattttttttggtcggtggtcaaagttatacatcggaagaatctgttgaaatcatattgaggcccctcatttgttatgttatgtaatctccaatggatcaaaagtagaatcccaactgtagaagatgatactatcatgctaggtagaagacagcatggaatatggggtaagttcaaagtggttacactctaatgtcgtctcaacgaatacgtctttatgaagaaataaaaaaatctaagtggttggatgcgtcatcaatgacgaccacgtcgttaaagacagaaagaaacacttgcgttcctgattctctgatcaatcaatgtgtataaatatgttcggatatgtccattatcttacgcaatcttgaaaagtgtttttgagagaaatataggttttacaaaatccaccgttgtgaattcatggaaatggtaaacgcagaagcaaaacagagtgtccctcttctcaccccttataagatgggaagattcaatctttctcataggtaatctaaattttgatccgttctttatgttttgttgacttttgctgaatccttaaattaagaagcttgattcatctagggttgttctagcaccattgacgagacagaaatcgtacggaagcgttcctcagcctcacgctatcttgtattactctcagagaacgtcaccgggaggttttctcatcgctgaagccaccggggtttcagatacagctcaagggtaactcaaaaacccttccttttcattaaagtttacgtttttatttgtgggttattgctgatcatcctacatttgtgtgatttgatcttgtaggtatccagatacacctgggatatggactaaagagcatgtggaggcatggaagccaatcgttgatgctgtacatgccaaaggtggtatcttcttctgtcagatctggcatgttggccgcgtttctaatcgcggttttcagccaaggaggcaagctcctatctcttgtacggggaagccaattatgcctcaaatgcgtgctaatggcattgatgaagctcgctttacccctccaagacgtctaagtatcgaagaaatccccggcattgtcaatgattttaggcttgctgcaagaaatgctatggaagctggtatgcatatccggattgggaattcaagaagctgaatcattcaagactcttatttctgtgtccttcaaatgttgttgttgcaggttttgatggagttgagattcatggagctcatggctatctgattgatcagttcatgaaggacaaagtgaatgacagaactgatgaatatggtggatcattgcaaaaccgttgcaaatttgctctggaagtagtcgatgcagtggctaaggagatcgggccagaccgtgttggaatcaggctctctccgtttgcagactatatggaatccggagacactaatccagaagcattagggctgtacatggtggaatctctgaacaaatatggaatcctctactgtcatatgattgaacccagaatgaaaacagtgggagaaatagcagcgtgttctcacacactaatgccaatgagggaagcctttaaggggactttcatctctgcaggaggtttcacgagggaagatgggaatgaggccgtggcaaagggacgaactgatcttgtggcttatggtcgatggtttctagccaacccagacctgccaaagcggttccaactggatgcaccgctgaataaatacaataggtcaacgttttacacttctgatcctgtcgtgggttacaccgattacccttcccttgaatcaacagcttaaaatcgtgttatcagtaatgtaatgtgtttccctaatgatgtaataagtttctggcttttgtttatactctaagtcattataccttcataataatttacatggatacattatcacaaaagagcttttatatgtgctttcaacatcaatcattttcttctaacaagccaaaaccaaaagaaaaaaggaataattttacataatggtacacaactgcaatagaaatatgctaagactgatatatatatgccccgatctcacctgaatcaatcatagccagaggaagagtatttccctgcgccaggaggtggcgctggtcgtgggaagtaatagttgaattgttcatctccaagtttgaattcttccacgtaggggctttgtggttcctaagattatccaacaagaaaacagtttactttcgattttaactatttaaagagactgtattcagagtgttatttctaaacacacaagtatgaatgttatgtctatctaacacaagtcagataagaagcatgtgtccattgttgaagatggagagagatgagtttagtgaaatggaaagatgaaagataagtaaaaggttcatgtgaaatgacacctgaggaccagaggtggagtgagatgcttcactggattttggtgatgtagaagtatcctcatcgtggttctttccatttccgtttaacttttgaggttcactattttctaaaggatcactctcactagctgttttggctctctgtatgagttaaatcctttggttagtccttaatcttaatccccaaatcacatttgaacagatacccgtcagactgtaagaaggaaatgaaaccagattttacctgaaagatcctccccagagcttttaaacctcttgctcttgtacgaagctcctctcttttggcttctggatcttgaagaacctagacaaaaagaatcataaataagtttacaaaccagagagattgaagaaagaggtcagatgtgaacatgagtattggttaagctaaacaaccagctgacaaacacgacaaagagtggcttcgatatcagcgacattgagcttccacagtgaatcaatcatcactcttttatgggcctgaaggtattcctcaagttcctcctcagtataatttccttcagtatttagctgccttttcatttcctcctgcaactggaacaacgcatatgcgcctaggatgacaataaacagccaggaacaaaaatcaaaatcactacatttctttcttcgtaagagagaagaccagattctaaaatctattcttggtttagtttcttctttaatcttacctgttgcagctgttaattgagatttgatgaagtgacctttgttcctaaaccattcagcaatgaatggtactccgagataaatagctttcttccctagctcttttgctgcttgtcttacatatatatacccaattgtattcaacatatccacaccataagctgaagaatacccaaatagaaggggatgagactcattttagcacagagatggtatcgattgatagagaaagcataactacaaaacaggaagcactctacataaaatgttacctgcatttgagagtcttgctacttcagcttcagcattactgataaattcgtctttgtttattacatattcgttgagtcggtctttcagaatctgagcaagcttgtcttctctttctttctgaacaatctgaaaccaaacacaatcgacaaatttagcaaattttgcacaaagaagttttggttgagcagggaacactaatatccaaaacttaccctcaatttttcttgtatctttttggtatcaaactgatccccttccgtgaagatatcaagtgaagccatagatgccatagcaagctgtcctatgtacccttcaaaaagttcgctgccaaatagcattgcaaatattgcagcaggatcgatgattgcatcactgacaggatgaacaaaaacaagtaagcactgagacccaaaacttttgcaccgagaagattcatgttactagagtccacaagaaaaagagactaacgttgagattcctgacttgccacatgcatcataagcttggcgttgtcctgaatcacttagcacttgataggcctctcccaagacctgaataagaaaatgagataaccctaaaaatccaagaatcttgcagaaaaacttggtactaatgattgcagtcaggcaacatcaacataagcttatgacctaattcagtttttccaaatctgaatccaacaatggaaattattaaaaagctctttctttttcaaagttttggaaatttgaacttgcctggaaattgtgtgcagcttgaggatcattagggttcttatcaggatgaacttggcgtgcctgtgtaaaaacaaaacaacccaacaatcactacaaattaggaactggaattgtgcacacactagagactagttctccattcgtgggtattggcatcatcacttcccaaattcagatgctaatcaaactcaccggatccaaataacagaccaaaaacaaaagggtaccttgaaatcaagagaagagagataaaaattgaacctttatgtagtaagctttcttaatctcagattctgtagcagttgggctaactccgagcacatcgtagtactctgtttccttaaccatcgatcacaaatcaaaattctccaccaaatctcactgccggagatggaaaacaacaattctaagcagaagaacaccacaaatctcttttctcttgttgttgtccgacgaaaagactccacgcgccggcgacgagatttcgaaatcaaccgctaagcttttaaagttggctctttctttctatctatctttcaatttacactttcgctggtcgggtcaaagtagagataaagtctcaaactttttgtcttcgtctttatttgaattcacaaaacccatttatatgtaatttaaccaacgcggtttttcgtcagcttctcattggctttttcgttctttctttttttccccgtatagattcaattcaattttgtttggcaacaactcaattaataaaaagaatattatatctagagatgaaggttcgatgtcgaccaaaaaagaaagatgacggatcaatgatataaaattctttgttttttttagggtgaaagattatattatttcatatcatagtttttgtaaccatcttccctgatttaaaaacctctgccttaagatactctacatgcctcttctcctcatcaagtgccttatcagcttcttctctctcttgagctcaacttgcgcaaaggcatagcttagctgaccaactttgcagacaaacttatcgtcaatcttggtttcattatcataatccttttgtagcctagccaatgcatgagttagctccttgttctccttcaccatgaattaactgttcctttcccattagctcaatatatcaccaatctcgctctctctatcacgagacactcttctgcttgatttcgcagccatatgagggccagggaacacatacattctccttcggcttgcattccaagtaacaatatggactatattcgtacttatggctcgaacgcaatcagaggaaatacaaccagcactatcgtacatgcctccagcttgccatcgccatcgagaaaacaattcgaaaccgtattatgtcactgcgctattacgaatcaaagaaattacgaggactgcttcaagaatggttccggtctagaatcaacagatagtttcattagtttcttctctgttttgaaggacagttttagatgctgttactatccttgatgctattgtgggtgggttatgatctactggacgaggcaatgaaaactgcgtccgagttcatacctgaaggcggtttttgacaactagtggcctcaaagcccgaaggtaagagataagggattgtaatgaagctttcttctcgtcttgatcatcgcatcaaagctcattgagatttcttatgccttggaacaagcaactcttattagaaagcttcatagcgtgaggtacttgtaataatagcttgagctctgtcctcgccattggagagtatatcctctgtttcaaaagttctgtatcataaagtggtttagtcactcaaataaataatttaccttttgataaattattacgagaaatatgaccgttattaaactttcttaataacgtttcaattgttttacatcagaattgaataaaaggaaacaacgttaacctagtcagaaagaacaaaaaaaggaaatcagtcgaaagataaccgtcatctcttctttcattaagaaatcaaaaatttatgcacgctcctttttcttcttccaaacagaaaaaaccctaattttttcaagttctatgttcttatagagagaatcgccgatgatccttccgatattgacataagctgatgatctcaataacttcattcttcatctcaatatctatccgtaagatttgatcggaggaaagcatcttgtttcgtgatttgatctccatcttctgtctccggttaatcgagaacggttaagggtcggctcacgcatctcttctttcatgagaaatcaaaatttctgcacgctccttcttcttcttccaaacagaaaaaaaccctaaatctttcaagttctttgttcttatagagaggatcgccgatgatcctttccgatattgaggtaagtacgtcgatgatctcttcaaaaaattcactttcgtgatttgatttccatcttctgtctccagttaatcgagaacgatttttaggtaattcgttactatggagagagggacagtgaaagcgacagatgagcgacggctgacgatgaagaagttacagaaaaaactcatcgatcttcttcgttcagaaacagggcagagaacggctgacgactcgcattaatgggccttgtcaatgggctttactgtgaggttgaagaagatacaaaactcatagattttcttcgtcgacaaacggggcagagaacggctcaaggctagtgccaatgggcttgtcaggttaattttcatcccattttcttgttaaattaagaaattaatatttttataattttattaatgggatattttctcacggatattttaagtttttttgcaatttttattcttagtttttgtttaaagttaatttttcatattttttagataaaaattatttttaaaatatatatatatatatatataatatttttgtttttaagtgttagagtttaatatgtgtaaaataattggacacaacatcccgtccataatatgaggtccttcagcgatgtcctaggttctatctattttgcacatattaaattctaatattttatatttaaaaatatttttatttttataactatttaaaatttaaggtttttatttttattttttaagtaatattttagacaaaatgttttaattattttaaatatacataatatttttgtttttatgtgttaaaatttaatatgtgtaaaatgactgaacacaacatcccgcccataatatgaggtccttaagcggtgtcttaggttcaaatatcttttgcacatattaaattcaaacatttttattttaaaaatatttttatttttatttttataccaatatttaaaatttaaggttttttatatttttaaataatattttagacaaaatgttttaattttttaaatatacataatatttttgtttttaatatatgtaaaataattggacacaacatcccgtccatagtacgaggtccttaagcggtgtcataggttcaatatattttacacattaaattcaaacattttttttatttaaaaaatatttttcattattatttttataccactatttaaaatttaaggttttgttttttaagtagtatttttgaaaaaatgttttaaatttctaaaatgatggatcaatgatatataaattgtttgtagttggatcaatgatatacattgttatcaaaacgttttaatttttaacataattcagtggaaattatgttaaaaatctgaaatggcctggaactctgaacgtgattgtcgttgcattcgaacctgtttataaggtggtgatggacatgagtctccattttctttcccaaggagatctttcaggcgtctggggcagagtctattggaggaggagagctggtttcaaagctatcaagattcagagtgcattcaaggcttatttggccaggaaagcgttgtgggcggtaaaggcacttgtaaggtttctgctttattgagtcttcacactccaacaaagcttcaacatcaagcatcatccagagacaaacagatagaaagcattggtccaataccaaatctgacttcaaagaggagtttcaggtatcgaaccattcgctgtgtaactcaaaggggaagtgcaatggctgggacagtagtgctctcacgaaggaagatataaaagccatatggttgaggaagcaagaaggtgtgatcaagcgcgatcgtatgttgaaatactcccggtctcatcaggtaaagtctctctcaagatctttatatatttggtttgaggtctcaaggagttgtttttgcaggagagaagaagtcctcatatgcttgaggactcactgagcacaccaaggcaacgtgtagggctcatggattctttgtttgttaactacaagaaggatggggataaagtctctctctggacttcttttgtctgcgaaaatagtaagattaacaacgctaagaagtcgtctctgaccacatatcaacataattgttaaatcttgaacattcatatcactttatttctctggttttctcttttgttttgttatttgggtctcatatctcatgtgctttatagatatggttatgaagaggtcattttttttggtgtttgatgtcttgcttctgttcatttctgttctagaggaattggaagcatctcttatcaatgtgattcattttgttcaaaccatgaaaaaatctttaagactgctatatgttcaagatcctcctatatatactttggttctgatcttcttagcctctgttcttgagaggtgcagttcaaagtatatagaagagtaaagcttagtctaattaaacttgtaaatgaagttgtatctcttgaacaagtttcaggggtcgaaataaaagaacaagtagcaaatcgaaactagtacatctgttcttcttagccgttttctttaaaacaataagtcaacgtgatccactaatacaaaggaggcagagcataacgttagataaatgaaaagcaatggtttagtagaaagtaatacaatcagtatctaaaccaaaaattagtaagagcgtatcagctaataaatggaaagtatttgacccgaaccgtgtataacggctagattatcaccgaacctaaggttagtgtttgctctggactatatcaaaccctaagtgaaaaggaaaaaaggaaacttgggagaaaaaaggaaacttgaatgtcaaacaaagaagtttatatacatgcgtctcgggtctcctctcaagttaaagacgcaattgctctgaattttttttcaattctcttcttcgatttctgtctgcttcgtttgcctctctgttctcttcctttttgagatttcattattcacgagttgttgcatctgctttggattcaccctaatctttggtgtgattcgttggtctggcctaagaaagacccatatatacaacggctctctctgttcacttcaaaagcaacgaagaagacgagagagatcacacacacaagcatcacgtcttaatttgtttgcctgcgatgataagatctatcatccaccgtagaaacagagagagagacgattcgaaggacatgttgacgggaattttaggcttcgggagtcatgatgttggaggttctatccggcgattgaggtgtcgatagattgaggaggtggagcgatcagaggattttaggctttgggagtcatgatggtggagcgatcatcggagattggcgatggagattgaggaggtggagcgtattttccgttaacgggtaaagatggcatgtgctctcagaggcccaatagaaacaattccagcccatcaaacaatgactagcccattgccaggttaattctcagcccattttcttgtttaattaaaaaattaatatattttataattttgattaaaggggttttcttctcaccgattttttaaagtttttttttgcaatttttcttcaattttttctttaaattaatttttattcaattctgttaaaagttaattttttcatatttttagataaaaattactatttaaatataaataatatttttgtttttaagtgttagagtttaatacgtgtaaaataattggacacaacatcccgtccataatttgaggtccttaagcggtgtcctaggtttattatctttttgcacatattaaattctaacatttttatatttaagaatattttccttttatttttataactatttaaaatttaaggttttaattttattttttaaataatagtttagacaaaatattttatttttttaaaatatacataatattttggttttaattgttaaagtttaatatgtgtaaaataattggacacaacatcccgtccatgaggtcatttagtggtgtcctaggttcaatatgttttgcacatattaaattttaacatttatattatttttataactatttaaaatataaggtttttatttttattttttaagtaatattttagacaaatatttttttttttaatatacataatattttggttttaattgttaaagtttaatatgtgtaaaataattggacacaacatcccgtccatagtatgaggtcctttagtggtgtcctaggttcaatatgttttgcacatattaaattttaacatttatattatttttataactatttaaaatataaggtttttatttttatttttaaagtaatattttagacaaaatattttaactttttagatatacataatattttgtttttaagtgttaaagtttaatatgtgtaaaataattggacacaacatcccgtccatagtatgaagtccttatacggtgttctacgttcaatatgttttaagtaatattttacacaaaatattttaatttttaaaatatacataatatttttgtttttaagtgttaaattcaatatgtgtaaaataattggacacaacatccccccatagtataaaatccttaagcgatgttctacgatcaatatgttttacataaatataaaattttaactaaaaaagttttttttatcattcaaaatgtctttattaaattattttgattactaatttttatttttttggtagaattgattaataaaaatttgattactaaaattttaaatttcaacaaaatgttctcattttaaaaatatttattacattttcaaacgtgaaaagtaaaccaagttagcttccagttcttaagatatttttttgtccattagaggtgtccttccgagctaattctcatttggcttccaagagtttaatatggtcttcgtttcctgcttccgcgactttggtctttgtgtcttgtggtttgatgggagtggaagcgatgttctttattacactagagtaaagatcaaactctgccttgagtttattacagcttgcttgtatccatttctccgccacacttgttgctacactgtcttggctatctctttcatgctcctcaatcgccggccttatctcgtcgtacaatgacgagagtcgtactgctgcttccttcttcacctcctgcaagcaacaatttaccaaacacatctgatactgagaaggttttgaatttgtacctatacgcttgaaaaactgttttacctcgtatttgagaacttcatcttgagcttctttggttgctagtagctgaaccacattcgctatgtcaacatgcttctgagcgacattctttgtttttccgcctgaaaacggcctgcctcttttcttcggaagagattcggacttgatcttggaaatgttaccgtgaacccgtgatacaattgcagtctttggcgatgaatcttcttgtgaattttgtgagagcagcttcatgtcttcagatgtttcggttttaacagtctccgtgacgacatcttcctccataggagttggagttgaatctgattgctgttgaatattcagagcagtagactccaaatggttctctgttgagatatctttctctttctcttcatttgtgttggactcgccattcttagaaggctcagatgtaagctcgtcctctgcagaatcatagactggaattttatcaactgaatacctggagacaaagaaaagagaggggctaaaatatcgccagtccaagatgaaaaacattcctttctcgcaagatccatgaccatttttatgccgcataaaataagtgaaaagaaaattaccgatcgtcaccatcctcccatacatatgtatcctcctgaaatgatagaaaggtataaggttaggtatagaccagtatgattaatttcattcctcccaatttttgacaaataatactatgaggatgataacgtaaggacttgcctgaaagccacgagacttggctccaagaaatccagagcatgcaaccgcaccacagagacaacgcactttggcaccaccgtaccattcaaaattatagtcgtaagccaattcggtccggggagagatgctctcttttgcaaagatcccaaccctaacttctcccagtacattccacttcctcgtctcacaatttggtctactgcaggaaaatagagaaagaaacgataaggaacgttttatagatatgaatttctttgaagcatgtaaaaagccagttgttcgttttaccatgaatgatttataaacctagcaaggcttcccttcttagtggcatcaatagcctcagatgcattgagagatataatgtatgcatccttgacacctgctcatgtaacacataattaacacatcacctaacatcacctatagcattacaacactctcatcatctctgtaaagtttctactcaccatgagtttcataagtttgagccctcttctttgcttctttccatgatattacttcaccacagtactccattataaattgccccgcctaaatcatagcatcaaatacaaccagtcatttaatcaaacccaattgactatttacttaagaaaaagaatacaccagccatgttatttgcccatttgcattagatcaacgaagtgtgacggaaattgtcataaatcttggtaaagagtatcagacatgataaagacacaagaataaattttgagtcctcacctttatctcttcaagagccactagtccccaaccacgaccttcacacttgatcaactttgttttggcgtattcacatttttggaacttctgtaaccggcaaagcatgtaaaactactaattaacattcatttaactcaattatcattagtttgaataggaacttgtaagaacatcaccaagctttaacgcaaatcttagattctagaattacatgaaaacgtggaagcaaagatttcaagttgttaacctgattcttgcaatagacaccacaggggcagtaaccaggagtacattcagtgttggtaatgacattgaggcatctctcaccacaagcactgtcagggtctccgaaatcaaacttgcattcgcagatagatatatcttcttccttttgtttcttgtgcctatagaagcgttaaacaaatgtgtacttaacaacaacgcatactgagaagataaccgaaagccacgagccagcaatcaaagaaaggatcttactttcgataagagaagtcattttgataaatgtgttcatattgtggcagctcatctccttcttgatccttcacacaaaaacatcattggcgaaattcgcacaaacaaaacaaaccaaatcgaaatctcacccaatttcacttacaggatcacaagaaaattgcatttttttgtcagcgattctcgcaatcagactcagggcctagtataggtcaagtttctacaaaattaaaaacggaaggagagaattaggtttatcaaactctgggattttaagatcgacacaaacctttggaaaggaagaaacttgcagctagaaacgaaaccacattacttaacacatatttatttgcaaacacacaaaattggatattggtgtaagagggaaagtgggaaactgaagaagcttacctgagagtttgagagagagaacgcgacgacgagcgaggacgaagaacaatagacggcgttaggaaaagaatgcaaccaacttttctttttctttttaaaattaggaaaaaacaatagacaaagctaaattaattaaaaagaaaagaaaaattatcatgttaataatatcgtgaccttaattaaagtagatatcatgtaactaacatctatgagaccacactatatgtcgtttcattgattacattttgtgttaaatcttgtatcacgattctaaattaatatttttgaaaaaaatatatcaaaaaagaggttctaattttgttagatacatttattgagttataagaagtatcactttttgggtgtttatattgtaatgggtacatgcaactttttaaaatatgatcataaaacacaaaataagttatttggctagatgaagtaaagggagatggctctaacgatggctataggagtagataaaaaaagagttattgccatcgccgtcggagtgattttagccttggtggggtcttggactatggttgctcctcaaaaattatacaaatttttatataataatataaccaacccatctctccttaattttaataatttaacttttaataagattatacaaatttcgataatttaagtaataaaaactacattatattcttatatttgttgatattatataataatataaccaacccatctctccttaatttttaattacttatttagtgagtaaataaaaatgattaaattgggaaaaaaacaagaacaaaaaaaaactagtctccacttcatttactttccattttgtattgctttcagttttgtataatttgaaaatagtagagcaaatcacagcctgggcttagctataactttttttttttatcatctagctacttttctttttgtgtgcaccaattcatcttgctactttagtcatcattatttaaattttgcatcacattttcttcccggttattatttgaagatatatactaataatatactgtatatgatgattgtagctcggttgagttaaccctaattaaggtttagtgtgtagaccgggttcaagaggcctctatataagtcagagtctgtaacaaactctctttaacgaaataacatgctttatatgagaatttagaatttcaataagattatataatttcagtattacctattaagagttttcttgatattggctaaattaattaacagggttacaaatttcagcctaatatagttattaaaaaaacgaatcaggaagataaatcccttcgttatgcagcagacacgacgtaacaacaaggcccgcgagtgttttaagctctagagtagacatttgactgttcagggaatcttgaagattctcttcagtttcaataggagcttccatttctctgtcgacatttctttctgcaattgttattggttttaatttcgagcatttgttttgggtcagaataatgagtcaaagaaaacgtagatgggaaacaacttatcttatccttgacttaccatgtagtcagctttgagtatgtcgatagatctcctcgaaatgtgactcacaagctcatcttccatgtcaaaatgccttccaaacatcttctgttcttcgcgatttgaagcaacaatctgttatacaaccagagaaaagcatcaagttgaaacctcaacaacttttgtctctctctctctttctctatacaaaggttgttgaagggaatgatccccttattaccttaatcgccacctcgtcgcccttctctgcatagtcaacaggcttgtggttgttctcaatagaggcaatgcggccaatatctgtgaactctctgcccgggacgcaaatgggggttccgatctaaaacaaacaagacgaatgttaaaaggattgagaatccttggacatgtgagcaagttaccgagaatatagcagagtaagaataggataccttaagtataccgtcgtggaccttaactccaaggattattgggtctctcttattgaacacacagttaggtaaaatctgaaggacacatgggaagactgcctcaccggctgattccttctttttctcctctttgatattctcaatgtaaacctgaaactgattgaataactgatagatgatatcagcgcagaagatttttactcccatttcgtctgcaagttcacgagcctctgtagtcactttcacatcaaaagccaaaattgtagcatattccttttcttctcgagcatcactccagccttcattatatccttcttatgcacaggccctatcccaataccactgacaggtatatttacagctggggtcttcaagaattcaagcaatgcttctaatgaccctaatgtagacgtttgtacataaactccttcaccacttttgtcaatcctgctcaaaaccgattccatatcttccatagccgactccttcattgcctcgatgtcatcatcaggtccaaccacatgcagggaagtaccagcaattgcgtgttcaaggcccttttaaacacaacccaaaatatttaggatatcatctaaacgtcagtatatttaataccagctgctagtgacaaagattatagtagagttagtccatttcacctgggcagtaattttgatgccttgtgcagcctttatttctttgtgatgcagataagtaccctgcaacatcaaaacaacactttttgatgtgtgttaaaaaaattgacatcggcaacaatttgcataatgtatgttactcgaggaaaaaacagtaacaagagacatgaagtggagatctaaaagtaccttcacccttaactccttcattggatgaggagtcagtaatgctctaatcgttgtgacaataggtccctgaaatatgaggaagaataagctcacttttctaagttctatgtatacccagtgcgttacttgtttggatcattagtttttttacttgcctgtagcccacaaacgacgatttgatcaccttcatggagttcaccgtttaccaacacaacatcaatcgttgtcccatggccttcaataactttgacctcaagtacagtacactgttcaacaatttcaagaaaagatcagaatccgcatgctgaagtattgcagaaacaagtgttacctaaagagaaaggaaagagacctgcacttcgtcaacatatgtaagtttctcaaccattgttttctgagcccattgaaccaaccacagcaagagatctgggaccccttctccactgtaatatcaagaaccaacgttacccaattacgtttaggatgaataacttgtctgttacgctgtatattacaaacagtaaatagagattcatacggcatgaatcataccttttagcactagtaggaacaatactgaaagtttctcccatttctttattcttgtaataaatctcagtgttgagtccttgctccttgaattgggttataatctggaataccatagaacaacataatttgaaaaatatgtacacaaagtgatagctcaaaccatacataagaaactctagacgtataacttacatcagtcagccttatgttgaattcattcgtaacatctttattttgctgcttcattgccttcacgataggagcattcttgcatgttttccatccatatagcctatccacctggaaagtgaagattttattttccatataagttttgcaacagagaaaaaaatcccatcgtagcagaataacaagcagtcttaccttattcaatgcaataatgaactctgtattcctcatcctcaaaagatttagagattctatggtttgtggctctaacccatgctttatgtcaaccaccaaaattgcaaggtcgcacaaacttgaacctcttgaccgcagattagtaaaggactcatggccaggtgtatcgataaccaatagacctggcaccttaagttttgcatccgctttcagttccctggtcctctctcggatgtttttggcagggaaatatgttgcaccaatctgctgagttatacctccagcctcaccttcctgtacatttgttcctctgatgcaatccaacagctttgttttaccactatcgacatgacccatgatacagcaaataatagaacggagattttctccaccttcttttataaattcacttggagctaagcatttacccttcttagcacgttttgtctgtgtagcagcatcttctacttcagaaatagcttttaccgcacctgttgttagcttgctcatacctgctggtttagctgttggcttttcagtttcatggtctgtaacagttcaaaaaattagattaaaaacagacattggataaaacactagggagaagaattaactacatttcgtactaacctgaatcatgtgcctttaattctttcttaaccacaggctgagcttcttcctctttatcgtcaattttaagatcaacattatcccagctttttgcatcccattcatcatcttcctcaaccccattctcctgagctacatcagcaggacctgatttctcgcctgtgtttgctgactctagtaaatcaaccttttcagtgtcttctgaacccacttcacctaaagtagctgcatggttttcttgtggctctacctcatcttccacctggacagaagtgtcattgcctttctggcgagatggttttttcttgttggcataaatgggacgctttgaggaagtagcatcaccaacatcatctgcaacaggaagacctctaccagcagccagcagctggttcttaaacgcctccctcttttgagcttcagtcttttgctttgctgttagaagcttgccctctagcttcttcctcaacagtttctccttttccttttcctttctcttacgcttagcctcctcagcctgagcctcaagctcttcctgcctgcggcgctcctcttcctccttccttaatttttcttcttcttccttcttttttctctcttctgcttcttgccgccgtgcaagagcctcttgcatctctctaacatgtttaggaattttcttctctgctgctttaccctttgcatccttcttcttcggctgtagtggctcagtaactgattcttcttgtttttcctccttagcctctacagaagaggttgctgcagcagctgcttttttttccttgtctttctccttcttctttttctttttcttcgctgcagcagtctcaacagtctctttttcaccctccttctcaccagcattctctacaggtgcaactggcccaggctgagcttgaactttctctacttcgggtgtcgatgaagcaggtctttcagcagcaggggtttctccaagttctgcaagaagtttgtccaaatcatcctcttcctctaatgtccttgcaaccttattcttattcttcttctttttcttgatctttccagtttctataacctccacactcttagtatcaggagttttagcttgactagtttcgtcggcaactgagtcatcacctagtgaggccaaaacaatgctgcccttctttttaccggaaaacgtgatttcgaggctctcttcgtctcccattgtcccttcttcctcgtcaggcaaagcaactttattagtggtcttcttagaagatttggaggacctcgttttcttaccagagaaagtgataggtgaaacttgttcctcatctccatccacttcctcgtcatccttatcaccaccaagggcatcaaaagctgaaaccgcaaagccttttttacccttgttagacgcattcttcttacctgtaaaacttataactggctcatcatctttgtccccattagattcattatcatccgtttcctccttaccagaaagcagggcaaagctaacagagccacctctgttcttacctttggacttcttcttcttccctacaaaaccattctcgggaacagcctcagtaaaatcatcgtcgtcatcatgcttctgcgtaaccttcttattactcttcttcttcccagtgataacaactttctcttcctcagtatttatggagtacttatcttcttcatcactttggacagctttcttcttggattcagcaccaacgagagatgacgcagcaggtggttgctcatcatctccacctcgagaactactcggcttcttccgacccattggttccgaaatcttccaacaaatcaccatgtatattgtgatgacatctttttatatggcattaccgaatcaagctcatgaatcttttaattcaattttttaatcatgatattcttaaatttattttaaatcttatcttattgaatctagcatttgttaaaatcattcaaaatctaggatttacaaacatttattaaaatctcaccttactgcaaactcaaagatttcattctaaaaaagagaccaaaataactcatagttaaaactatcttcaaataaagttatttttgacatatttaattattattttattatattaactcttttatatatatattgaatattaataaatgtaaaatataaacttaaaaaaaaaccgaatctcaatctaaacaaaatttactttaactattaattaaatttttactttaaaataatcagtgtaatcacattaatcaaagaccttttcatgtgctatcaacattaatcattttcttctaaaaatcccaaattcacattaaaacccaaaaccaaagaaacaaaggcaaatatacatacatggcacacaactgcaatatcaatatgactgcatctgcatggtatataaattatacaaacgggatttgaataagtaagaaactgctacagagatacctctgatctcacctgaatcaatcatagccagtcatagagtgtttctctgcggcaggaggtgggaagcaatagttgaattgttcatctccaagtttgaattcttccacgtaggggctctgtggttcctaagattatccaacaagaaaacagtttacctttcgatttgaacttttttgaagagactcagactgattcagagtgcttatactataaacacaggcatgaatgttatgtctatctaacacaagtcagataaagaagcatttatctattgtcgaatatgagatgagcttagtgaaatagaaagatcaaagataagtaaaagattcatgtgaaatgatacctgaggaccagagctcaagtgagatgcttcactggattttggtgacgtggaggtatcctcatcgtggtcctttccatttccgtttaactttttgagattcattatttgctaaaggatcactctcataagctgtgaaaagttaaatccttgaggcctctactaattaacaccaagttacgttttgaaacactatccaaaacatccaatataagcagaaaatacaacgcacacatttccactcatacatagaaaattaacaggaacaacaccaattccaactctcattccgcagtgtttcattgaaagtagcttcctctatatgttacaaacttacaatacacaaatcttatcagttatcaccaaagtaagtgattccaagaatgaaaattgttaaaagctcaatcttttctgaaatctcaacttacctgcaaattttgtcacaagggagaaattttggttttatcaatttctgggattttaatatctacacaattttattgggaaaggaagaaacttgcttctacaaacgaaaccaccggaaaactgaagaaggtttggttacctgagagtttgagagagagaacacgacgacgacgaacaaaagacggcgttaaaggtatttttcacggcgttaagaattaactgttcactgtgctctgtctcttccgcttgtttcatttacgattgggctttttctgggcttccttgttgggttattttgttttgtcgtcaaactgtttcattaattttaaaaaagagtacaagagtgaccaaagcccaattacacaacatcaaagcccaactataaacccaacaaaaaattacaactaaataaaccattatttttatttttgtttcttgcttgtgaattgtatattcgattacaaattttgagatggcaaaacaaaacaaaacaaaaaaaggttaaattatagtatagttttatgaaattctttgaaaaatgtcacattcttttttttttatctttataaaggtcacaatatatttaattattagatatacttaaacatatgttgtgacttaactaattactagatttaacatataatctatttaatattagattataatatcaaacacatgttatgatctgattaatattgcaaatatattttgaactcattttaagatttattcaactataaaacccctcccccaaaacacacatatattttggcgaggagaacaagtgtaagggaaaatggattttgcggtggcgctagggataggcatcggtgccgcggttgttatagccttggtggctgttgcggtatggtttttttgctaagctgttgcggtatggttcttcatcaaaaagctaaaatagtaataccataatgtattaaatcgtaatcagcgtatctctaattctttaataatcagtttttatggagaaataactgactagaatttgtatttcagtatttcttgacattttacaaatttatagacgaaaacaatctttgtggttataattgctataatggtttgaaatgcgtttcgataatggataacctcaccaattatgtattgcttagctttttactacgtttacattatcttttgttttctcgtaagtacgaataaaacattaaccgaaaacaacaggtaaaaccaaacggtttagtcgaacaagaaatcaattggacaaaactagaagccattatatcagtcaccgtataggtataattcctcaggtggtccagtccaaagtttacgaccaatcttattttccatccgcttctttagtcctctcagtatcccaatctctagtagcttctccggtgacatgcagtttgtccaaacagtatgtcgtagctctcatgaacaaatgaataatactgattactgttacaagcaaagagttcatataaatctaacgataaattccttgaaatcttgaatcaataaagaactgaagaccagcttgttggttttggtattggtgtattaggagtgcatataataaaatccacatgaacgtcgtgaatcgccagtttctcgaggggtatatatattgtccacgatcggacaatcatgtactgcaaaacaagtaaaagcttcgtgatgagtcatgaaaattaatagaaaaacacctagtagaaagctttccaaacttgttttttatttatttatttttaagttttccaaagtgttttttttttaaagctttcccaagtggtttttgttggttattcttacaaatttccctatccaaaattatatatataccgataacatattttcttgaccaaaaatatatatgttaaaatttgagatattgttttaaatctaacttcttctaagctacaaataaaaccatcaagctatcaaatttattttttaaaaaattaattacatatcttcttaccctttttttgtcatcaacatatcttcttaccaatatatcagattattatattttttttcttagttctcttagatgcatatataaaataatcttttaaaatagttattattttctatatttttaatcaaaaatgttacaatctatttaatagatatatcatatacttaaaggtattattcaaacaaagaaggatatactcaaacctataatataagcataaaatacataatttatagtactctagcatacatatatcacagtcaatttaatattagatataataaacacatgtcatcgtgatctgatgattgatattagatatagtaaaagctttatttaattatatataccatttttgtattgctaaagtgtacatcacataaaactaatcataaacagataaactactacgcaagacacacgcacacacaaattgttgactgtgaaaaacaattaagcgaaaatgaatattgcggtggcgtttgcgataggcgtcggtgcctgggtgattataatgttggtggctcttggtatatggttcctcgtcaaaaagctaacctcgtaataattgggatgagtgaaactttaacgtaatcagcttattttctttaaaaattagttttcatggacaataactcacgagccataagtatttcttgaataagagtttttttacaaattgttgatgataaaattatgtataaaggaaaaaatctatgtacgattattgctattatatggtttgaaatgtgtttggataacggatgaaatcaccaattatttatttgcttaatatacatatcttttgttttctcgtataatacagtaaccgaaaacaaaccggtaaaaaacaggcggttaagttaccggcgttttcgctcagccgtaggaggtaatttctcagatggtccagtcggaagtttacggccagtcttcttttccagtcgattctttagctctcttagtattcgaatctgtcgtagcttctccggcgacagtttgtcccaataaattcctgcaaaacaaaaaaacgatcagcatgttgtgattcaggcatagaattcagaaaacaatatagtgaatcactgaataaggctgatgataattcaaacaccaatctactgacagatcacatgaaaaacttgagttaataaggaaatcaagaccttgtggttttggtattggtgtgtttgtgaaaatgactcgagtaggagtgcatatgatatccacaggaacatcgtgaatcgccagtttctcgagaggtatatcatctacaagctgacaatcatgtactgcaaatgaagtaaaagcttcatgagccaaggtataaaagaaaaagtgtatataaaggtttcttctaaattgtatttataccagttgtaacaacgggtgtggaatcatcaatggctcccatgtaacgcaacattccatattcgagttccgcaaaaccctgcacacatagtcatatcaaactccaatcatatggtttggttcaactaatatcttttaaagttaaaatgaattgtaacaaatctcacctctcctttccctaatcgagcacccgtttgtgggttaaccgcaacagagccaatgacaatgagatccactttgattttctcatcaaggccaatcgctcttccatatttggctactcctacagaagtgcaagcctccatgatcgtttcgggtttcaacaaatcagattctagtacagagaagaatcctgttcttagcctcggttgaggagtcaacagcttcttttcacctacatttacacaacacaatgtctaaaatccgaattcaagactaaacttactaacatcatcagaagaaaagagaacttcataaaaaaaactgtgacaatgcaacaattttgcggccaaatgtttgaagtatgattgaacatgagttcaaaactctaaattgtgaagaatttgctcagatacatgtatacctatattaactaaccagaaagtgtaagaaacctgatttgcttttgaggcgaatcgggattaaccttcacgaccatagccatacgaaaagcatcaagctcggctaactgcaccaagaattcaaatttggcaaattcgctaactaaggcaaaacctagaaagtgaagaaggaaggtaaaattcgcaaacttttcttgcagcagccgatgcaccgacgaaattagggattcgatgatgaacaggtctagggctcatagcgtagttccgagcttccatgagatcccacatcttctttcggataacccatttccacgctttcgggtcactatctggatccgattctagttccttctttgcagtctccgccatatcctccatcgccgccgcgtcgaggctcaaccgatcagcctcataagctacagcatcgaaagcgacgccgtcgccgttctccgatccgattctagagagattcctccgctgtgacccgatttggacggagagaaaaggcggtttctgggaattgacaaaggaatcggatcgaaaacgaggattgattgcaaatccaggtgataatcttatcattggtagatccacgaacacaatcaattcagggtgtgtgttttcgaaaaatctcagctttgttctccgtgttgttctcttgttaaaagataagaaattaacggcttagatcatttgtttcagttcccgctgaaaacacttcaatccttcttgggtttcaatttcaaaacctctcttataaatgatttaattaaatgggccttttatctgcccaataagcaatcttcttctaacaatacgcttccgcgagcttttctctctaaccacccatccctccacgtcataactacacgcgctatcaatcttttgcattggacgggtaaaaaagcgagtacacaaaaagagcgcgtggtttgacttaaagagttgtactcgcgtttccaagagcgggtttagcaaattcaaattgaaacatttatgcccaaaattatctgagacgatttcgattctctaaactcttccaaaattaacatttgtgtggtgtttagtgatttatggtgagagaagaatttctcattgtttcgatctttgaaaatgaattttcatggaatgaagaggaaggatctacaagctctatgcaaaaagaatggaatcccagcaaatttgaagaacattgagatggctactagactcgcttctgttctccaggtaatttcatcatgatcctaattcccaatttccatacatttgatttgatcatcttgcacctttatcttagaattagtctgtgtgtgtttacgtagaaggaaactgaaggaactttaacggatacgataagtttgtctgaggattctgttgatgttcttgaggatgatgtagctgttaagaaagtaagattcagtcctgagaatgaagtatttgaattcactcggtctctcaagagatgtcagcggaagtatgttagcaaaaggaaagttcaagaaagtggaatagagctaaggcggtcaaagcgaagtgttgctaaagggaaagcaatagctggatctagtgaaaacgagtcaaacacaagaagaggtaaccggtctgatgttacaaaggctatcgaggtcccaaggcggtcgaaacgaagtggctctaccggtagtagtcaagaagactgtaaagtaacggagttgatggctttggaacagtttgagtttgaaaatatctcggaaggattgtctggaagtgatcaggatggtttcaagtttgaaaagattgggagacgctccacacagctgatatcgaagacaggaaacttattacctgttaataagtcaaaacgacttgtagacatcaaagataatgaagatgagcttgttaagaataatgtgaatgaggtatctatggatcagagaaggtcaataaggcttaaagctagagctgcaaaccaatcaatgggaggtgagtcatccgatggtagacccttatgctctgctaaggaaactaaagaagaaataaagattaagcagtcaaaaagatctacggtggtcagtagtcaaaaagagcttgttgagagaaaagcaaaggagcctttagtagatagcaaagttcctaggcgttcgaaacgtcttgcgaacgatgtaaatgtgctactggataagagacccgttaaggctgtgaaacctgattatctgaaagtcaaaaaggctccaaaacagtctaggcgacttgagaagagtctcagtgaactcctaatagatggccaagctcaaaagggtgataaacagcgaacttttggaaatggtcgtgagggtaaaaagcttctacgaagttcgaaacacactgcatcaaataatatgttgggtcaagcactgagtaattcactgaaacgttgttcagttattgacggtgaacgagctggagtctctgttggtgatgtgaagaagtcaaatgtgaataatgaaatgcagatccgtgttagagttactaggaactcttcgaggcatcattcatttaaggctccaatagagtttgaaaggaatcttattgaaaagaagtcggatgaaacttttgtcaaatcatctaaaagaggtactaggaggatgaagcggggcagatcagcagagccagggaaggacatagaaactcagagcaatctaacgtcaaaaaaacttttgaatgagtatactcagtttgagcaagaagaagcatgtgacgctaatgtggaagttagaggctcctccaagaaggcaaagacgatgaatcaagaatgcgttaaggatataccacaagtaatgactgagaactcaccttcttcatccgaaaccatagctgcggaatctgttatgattgttgagaatgttttggattcttcaccggaaaaatcagttgatagttctcaaagaacaaacactcaagagttgaattcggaagttatggaaggaaaacatgaagagaaacttgagggagacacagttttgatggttgcgattgaggaggaaaaaaaggaagtatcatcaagctctgtacttcttagtgagcgtttatcacctacttcagtacaatttgcagtaagcaactctaaagctgagctagttgtccctaccggccatatccttcttaatgattttgctgaggaaaatagcaaaaccaaggaggagggccttattttcactcctgtatctgagcttaaggagcccatctctgtagaaggtatattcgtttgattcatttgatctgaattattttcacttttatggctaactaattattttccaatctgtgctgctttctgacgtttaatcacagcaatcttggaaaactcagttgaatgttggaacgagattcatttaagcaaacatgatgagaaaggtactaatatacaagcagaaaatctacatggaaacttctctgaatgcaacactgagaatagtaaggttgtcattgtccatccggagatgctggatgagataagtgtcagtcattgtgtagacctggagatgctggatgaggtcaagaatggcaatctggagaaatccgagcaaagaagtggctgtaaacttaatccgttggagctaaaaagattctcgtcaactgacttcacttctcattctctcaaggaaaagaaggtttcaaagtgttttaaggaagacgaactaagagcttggtccgaacctctacccagaaacaaaaatgctagcgcctttgatgagttagctatattcactaccccagagaggaacttaatgttgaggggaaaactcagtgaaaatggaaagacgcttgcagctgattcagttatccatcacaatgttatagcagtagagtctcacgctgttgttttcacagcttctaaacaagctgggacagatgaggccggaaaggaagaagaacatacagctaccaactttccggatgaatctgatgttttcaataccaccaagaaattgggaggctccagacaaaccgaagctagaaatgaaggcgaaagtatagttgttgagcttcatgatgagtctgacattgctactagtctagaaagacaactcagtgcgggagactctaaaggagagggaatcggtaggaatgaagaaaatatgactgttgagctccattgtgaacctgacacttgcactagcccggatggacatacactcttgggaaattatgtatcagatggagcagaaaatagtgaagagaacaaagctatggagttcaatgacgaatctgttgatttaactgcttcagagagacatgagatttgtagatcttttggacaagatagagctagagaaagtgaaggaaaaaaggttgtgctgttctatgaggaatcgctacacagtgatcaacctttagcagattctgaactaggcgaagcagaatgtcaagaaatcaacagtgctgacaagtcaagtctttttacaagcctggagagacaacaactattctatgagtgttatgttcccaatgttcgagaagactcggaacgggacgaagctgcaacaagtgaagaaaacaaggctgtggaattgcaagttgactgtggcattttcacaactcccgagaaacatttactacttgaaacagatgaaggggtaaaaggagacaatataaccgccaagtcacatgttttgtctgatgttctcgctgctgatgtgccccattctcttatgggagactctgagccagatgaagctgaaaaaacctccgtagagatcaaggatgtggaattgttgggtgaatctaactcttccactaatccagagagccccacactgtttggaaactccgaactagatgaatcaagagattcttcagcagccacgtgcgaagaggcttttgttaccacttctccagagaaagaacttttaattaaccctggaaagcaagaacaaaaggaggtggacgaaaatgtggttcaggaaagtcacgttgcagctccagatttcagaggaaacaccattgttgactcaagcggtggtatcgcatccaaagtttcttacaaccatgagcttaatgcggggcaagaaactgcatgtgcagagttaatgtcaaaaggttctcaggcagaggatgttgtaggtcttgatgctacacaagggacatcaaagaaaagaagagggcattctccacatgctgactcagtaaatctttttgattctaacattgaggaggtagatacaatcatggaagcagaaagaaatatttcctttagctcctatgttgcggtaccagccgagggtaactccgagacaattggcgaaatttccagctaccttgaagttgctggaacctgttccatggtgtttggtgagcaactttcaatagaaaattccatagagccaacataatctaaatcatatgacgtaaccataagataaccctcttgtctgaagttattatgcttatgtcattctagaagtttgagtttagattttcatatctctttctttattcctgaaacgcagatgaatctggatcttccacagacattcagaaccaaataaatgatgcgctgaaggaatgggcaataacaggtaattatcacattaacactcttaattttcatcatcaagtactttgtttctggatgcatttcatgagtgaaagatagtctaattatctccaatcatttgtagacaaaaatgaagcagatgagctcatagaagcaattgtaactaagaacattcaaaaagacttcgaaggaaatctccttctgaactcctcaggtggtggctctaatgtctctggagaaacaagcatcttagctggaacggcggatgaagatgaagcagctggtccaattgctattgccttcggtaaattttctcttttacagacatctaagcaatttccaggtgttaattattatattgggatactctcgactaattactgcttctactaaatccattctcacagttaaagctatgtctctgactcctgatgaattgactgttaagaatcacatgaatgaaaaaggttagatttcttacagatgatatgcctcttatattcaaaacaatgactaatctctagaatcatttacctttatgtttctttttaaaatagctgcagatgaggaaatgatcacgagagaaactactccaattcctgaagaaaccatcaatgagtcttctgagaacaggaaggagtattcaagcattgatgaatcagctacgttatccgagatgcaagtaagaagagaaccaaccttgattttcagaacacaagtgaagcctacgaagcatgacatgaaagagaatgcaccaaactcaaaaattgtgcataatcttaacgtaacagctccaagaacatcaaagagacagcctctccaagacttgaacaagaactagatgacggaattagcatatctcatgcacgttaagaccttgtctaaaacttctcttcttctcttatatatttatgtgttatgaaacgcctatcatgaattagctctactaaatctagcaacctttcaaatttgcagtattgcaggtgtctctgtgtctttaaaatagttgccttatgatttcttcggtttcaagatgatcaaatagttatagatttcatgctcacacatgctcattagatgtgtacatactttacttacccaaatctattttctcgcaaagattttgatggtaaagctgatttggttctattgaactaaatcaaacgagtttcagactgagtgattctaatccggcccattagcccctaaacagacccactaattacgcagcttttaatagagtaattacacctagtttacccactaaaccactaagcactaattatctcacaatctaatgagcttccctcgtaattacttgggctttcactctaccatttatttgtaacagtcaagtctctactgtctctatataaactctctaaagttaacacacaattctcatcacaaacaaatcaaccaaagcaacttctactctttcttctttcgaccttatcaatctgttgagaaatggcttccaaatctagtttcatggctaccttcaacattgtgactctcatgctcatggtggcttcctccacagtgacagctcgccctctcatgaaaccatccatggggacgtcttctcctaccacaagccttgtgtacaggctcaagcttgatgaagatacagggtactgctgggactcactgatgcagctccaacactgttctggagagctgatcttgttcttcctcaacggtgagacttacattggccctgggtgttgcagtgctataagaaccattggacgcaagtgttggcctactatgattggtgttcttggttttactgctcaagaaggtgatatgctccaaggttactgtgatggcaatgactctgacaacaatggtgaagaccatgctcttgcctcctcaacactgcctctctccgtgaatttcaagactaccgttgttagatcttctgcttctccttctaacccttgagtcttagtattcatctttacactcctgctatgttttcttttgctaagagaattttaatctttatgtaactggtgacgaatgcttgaaaaatagcgtctctgttattacttttgagaataaaagatcatcattactcacaacaaggttttacaaatctggcaaacataatcttcttcttctcaaattctccaagttaaatcaaccgaaaaacatcgctatcactaagtcctgaataggtcaggaacagttgaaaaacatacaaataattaaaaaagagttcatgatccaactatggcttcacttttagagaatcctcaattcgttgaatgagttgtttggccgtcaaagcaccctcctggaaatcacaaaaaaagaaacgtttgtgagtgagattaagaaccttaaaacgaaaatgaagaaattcaaaggcattgaagtcatcatacaaagcgatcacaaggttccccatctttgaataggatgaaagtaggaagtgcctcaatcttgtatttattagcaatactggggtatttttcggtatcaatcttcaccacctgtatcttgtctttcagggtttcactcacttcattgagtattggaaccatgaactggcaaggaccacacctgccaaacaaacagtacattctgattccaaatcatctgtttaacaaataaactcgataataagcaaacagactacactggatcccaacatagaccaagtatactcattcatgatgaataatagtcaactagaactggttgatgaccactcaactaacacatgttatcatttgacaccaaaacaaactcaccaggttgcataatagtcaactagaactggtttatcagagttcacaagcagatcctcaaatgagtcaaatgtctgcttcttggcttcaatctgaagtatgaacaagaatggtttgtcatttagttcaatctaaatcaagaagtagataaaggcactcactttaaatcaattccaaactctagagaaaatcagctatagaaactaaaataagaaaaatttcaaaataggaaagctatcatcagctctaccatcagaagaaagtttgaagcttgaattcaataattcatagggtaaaattaagtaagctagaattgaacaaaatataagctttggaaaaagatgtttaagcagagaaaggcgattacacgtcgaggagtgcatcgagtcgttgaagataaagatggaaactttaagtctccggttcgaacccgacgaaccggaaactgaaatttgacggccgagatagaacgagaagcgaaagcagaaacacctgacgattctttcgaattcagcgacggaaccgtagaagaagagagagaaattgacgccatgaaagaatcagaaaaaaacaaacgatctcttgattcggcgttggcggttggttaggttgatgatgacaaaaaaagttggacacttgtggaaaaaaaactcgaattgaccaaaaagagagaacgaactctgaaagaaaatgacacaaggtactagaaagacaatgatgatccactacggtcaagtacaccgtatcttttttgttataggcccacaaacatgttctaggcccacatgttataggcccgttcccaaacaccgatcactcttcaatttaactttttgctcacaatcttcaggctcaatcatatgacatgacagatctcattgtaaatgcaatcgcaaagggttatcattatcaactagtactataaagatagctgttacttcccgccaacgcaactgggacagttaaaaccgttgagggtaacaaaagacaaaactcacgactccgtttttgagtttcctgaagatggaagttacgaatatgttcttgtgggcctcttcaaagaaacgatatgaaatagcctaatttaaacaaaactagaaaagtgtggactagagagagactttagcaaaaactaaaaacagatgtatcaaaagaagctcacaactaaaaaagatggagcttgaattaggtctgaagatcactcggactaaagacgatgtttcttcctctacagattttcgggttgccagagattcttttggtcatcgttcactttctcgagaaaccaactctgttttcttcctcattcttcatctcaaaggttctattccctctcatatttattcacctttttttcttacctagcatagagattgagattgaaaaccaaatgcaggatttaagaaggatggtatcgatatcgagataaacaaagaagggaatctgattaagatcagcggaagaaaacaggttgaagagatggttttggtaaagtgggtggaatggaaaaaggaaacagaaataaaggaattcaaaaaagtgtttcggattccagatattgtaattcttgacaagatcaaagcgaggtttaatgaagaagatgggactttaactgttacaatgcctaagaaagttaagggaattaccggtctgaagatcgaggaagaggacgaagaagaggagatgaaagagccgatagtagaagagaaaacagaggagaaaacagaaccagaagaagaaatcaaagaagagacaaaacctgaggaagaaaacgaagaagcagaagagccacagagagaagaggaagaagaggttgttgaggaaggaacaagagatcatgaggggaaaaaagaagaagaaatcgaagataaaccaagaaagaagagaagaaaaaagtttcgtttaccatgttttgcaggatccactctgcttatgtctattattgttttcattattcaactgattcaatccagaaataaatgaaaccacactccttaggtttttaagatagggttcttgttggtttttaaggatagaacccactttcttattatctgttcttcttagccttgttctttaaaacaataaaagtcaacgtgtaatacaatcaaaatacaatcagtatctaaaccaaaaattagtaggagcgtatcagctaataaatggaaagtatttgacccgaaccgtgtataacggctagattatcaccgaacctaaggtttgtgtttgctctggactataacaaaccctaagtgaaaaggaaaaaaggaaacttgaatgtcaaacaaataaatttatatacctgcgtctcgcgtctcctctcaagttaaaaacacaattgctctgcatttttttcaattctcttcttcgatttctgtctgcttcgtttgcctctctgttctcttcttcttcctttttgagatttcattattcatgtgttgttgcatctgcttgttggattcaccctaatctttggtgtgattcgttggtctggcctaagaacgactcatatatacaacggctctctctgttcacttaaaaagcaacgaagaagacgagagagatcacacacacaagcctcacgtcttaatttgtttgcctgcgatgataagatctatcatccaccgtagaaacagagacagagagagagatagacgattcgaaggacatgttgccgggattttaggcttcgagagtcatgatgttggaggttctatccggcgatggaggtgtcgatagattgaggaggtggagcgatcagaggattttaggcttcgggagtcatgatggtggagcaatcatcggagattggcgatggagatggcgatagattgaggaggtggagcgtattttccgttaacggataaagatggcatgtgctctcagaggcccaatagaaacaattccagcccatcaaacaatgactagcccattgccaggttaattctcagcccattttcttgtttaattaagaaattaatatattttataattttgattaaaggggttttcttctcacggattttttgaagtttttttttgcaatttttcttcaattttttctttaaattaatttttattcaattttgttaaaagttaatttttcatatttttagataaaaatttattttttatatatacataatatttttggttttaagtgttagagtttaatatgtgtaaaataattggacacaacatcccgtccatagtatgaggtccttaagcggtgtcctaggttcattatctttttccacatattaaattttaacatttttctatttaaaaatatttttatttttatttttataactatttaaaatttaaggttttaattttatttttaagtaatattttagacaaaatattttttttttttaaatatacataatatttttgtttaagtgttaaagtttattatgtgtaagataattggacacaacattccgtccatagtatgaaatcggtgtcttaggttcaatatcttttgtacatattttgttttaaagaacgaggataaggaaacctcttgtctaatatgagttttgtgttgtttcactggttctcgaatagaataactgaaaagatttatagttgaaaaaacttattcggtataatgcttgcttatataacagactcaaaatcgatatgtaaaactttaataatttgttgaattggtttcttgaggtcgaaggcaacacaagagagaaaaaagcgttgactgtttgactattttcaagtcctacagtgcaagcaacgaataaatagtccttctccttgcctttactctttagtggagcatcgacaaatcaaaaccctagaacctaataaaaatctccagaacagaggaaaggagtcagcaatggagctcgaactgggattaaagatcacgagaacaagagaagatatatcgtcctcggtcgattttcgcttctccaaagacccatttggtcctctggtgctttctcgagaaaccgattcgagattcatcatcatcattcatcttaaaggtcgaaattttactgcagtttttttcttgaatttttgtctgtttttttttagtgtgctcaacgaatgggacaatagggttgatatatttagggtttagtgttctaattgattagaaaaaaaaactgataagagaaagttaatttggggacaggattcaaaaaggaaggtattgaaattgatataaacgaagagggaaataggattacaattagaggaagaaaaccagtggaagaaatggttatgattagatggatggcatggaggaaagaagtggaatttagtgttttcaagaaagtttttaggattcctgatactgtcgatttagacaagattaaagcgaggtttgatgacgatgatgcgactcttacgatcacaatgccgaaaagagtaaaaggaatctctggatttaagattgaggaagaagaagaagaagaagaagaagaagaagaaagagtggatgtgagtgaagctgagcataaagaggaaacagagaagggggaactaaaggatgattacttagagaagagtcaccagattgatgaacgtatagaagaagaaaaaggattggctgattcaaataaagagagtgtggacagtagcttaagaaagcctccggacattgaaggaagagaatgtcatgaacagacaagacatgaggaacaagagaataataaacaactggttcaagcagagagtgatgatagtgatgattttggatccagagcatttgaagagattgaagaacaagaatctgatgttttagatagaacaagtacaagtggagcaatggaaaaggaaatgactgatgatgttggtgatggcttgagaaaggttcaagggattgaagaaccagagagacacaatgaagaaagcaagatttcagaaatggtggatggagaaacaagtggtcatgagaagaaaaaagttgtaaagatggataaaaaaaatagggatgtcaaagaagaggttgatggggcaatgggagaaggattcagaccaaacattgatagaacacaagtagttggtgatgatgaaattgcagaaactgagaaaaatgatgaagagtttgaatctgataaactagaagcagatgaggttgacaagataaatgaagggggaaatactaaggtgagaagacatagtgaagacagaaacttaataaagcttcaagagaaggaagaacaacattctaaggaacaaaagggacacagcaaagaagaaaatatgaaagaattggtggaagagaaaactccagaggcagagacaactataaggaatgatattctaggaccaggccaggagattgaagtaccagaggtggatacgttagggaaaacaagtgatgaaggaaaggagaagcagaacattgtaaagaaggaaattaaaaatggagatgccacagaagaaattgatgcgaaaatgggcgaagtttttgcatcaaacatcgcagatactgggatgaattctgaggattttgaatctgataaactagaatcagcagatgaggtagacaagatggttgagaagaaagacaggcaagaggaaaatgataaggttggagcacaaagtgaagacattagcttgacaaagcttcaggagattggagaacaacaatttcagggacaaaagagacatgataaacaagaaaatatcaaagaattaagagaagggcaggcttcagaggcagagaaaaatattaagaatgatatactgaaaccagttcaaaagagaagtgagggaaaacacaagatccaaaaaactttccaggaggaaacaaataagcagccagaagggtacaacgagaaaattatggagacagggaaaaagattaatgaagatggcacaagaaaggttcaagagatgattagacaacaagaattggatgaaccggcaagatcagagaaagaaaacaggagtcgagaactggtgaaaagcaaaacaaatgatgaagagaaaaaggagaaagaaattgcaggaacggaaagaaaggagaaagagtcagatagaccaaaaatactcagggaacaagaagtagctgatgaagtagctgaagataagaccaaattttcaatatatggtgaagttaaggaggaagaagaaattgcagggaaggaaaaagaatttggtagtgatgatgatattgcaagaatagttagagatacagaacagctagattcaaatgcaatgaagggacaagaagaaaaagacatgattcaagaattagtattggaagaaaaagtatgtgatggcggcaaaggaatcattgcagtggcagagacaaaagctgagaataataagtcaaaaagagttcaagagactgaagaacaaaaactggataaagaagatacatgtggaaaacattttcagaaacttatagaaggagaaataagtgatcatggagaagttgaagatgtggagaaggggaagaaaagaacagaagcagagaagagaatcaaggatagagctagagaagctgaagagatcaaagaaaaggatttgggtgtatctggaagatatattaaaggaaccacgattaaagaactcgttgaaaacagaggaatttatcgaaatgaacatgaagagaagaagaaggacgacgctaacagaccggaaaagataacaggtacaatcaaacaagaattggttagtctgaatagccaactaaggcaagaaaatgttgaagatggagacaagactcaagaactggtggaagagaaaataaaggattgcgaagaagaagagggcagtgaagaatcaaagatcaaaaccgatgatgttgtgaggaaggttcaaggtattaaagaagaggagttgtataaaccaaaaagggaacatggaaccaagattacagaattggtagaagagacgacaggtgattatgaaaaacaagaagagaaggaaactgcagagtcggacatagaagctgagtgtggtagcttaagaaaggtagacggtattgaagaacatgagttgcatgaaccgaagatacacaaggaacgcgataataaccgagtaactggggcaaaggaaccaagtggtcaagagaaaggggaaaaggaggagaaaattgtagagtctatgacaataacagagaatgacaactccatagatgttcaagagactaagaaagaacgacctggcaggctagagagccatgacaaacgatacaaaattcaagaattactgatggaagcgggacataatgaccgtaaagaagaagaacaaaacgaaaatgtgacggccgaggtagaactggaaactgaaagagtgagctccaaaaaggttcaagagggaaaaatggaagatgacaattcaggcaagtttcatgagtttgaagaacgaaaatcatatgaagattggacacatgagaagcgagaaaagagaaaagttttagttgaagaagaagaaacttatcccaaagataaacacactggtggagaagaccataatgaccataaagaagaagaacaaaaagaaaacgttattgcaaaggcagaactgaatactgaggaagatagctttaaaaaggttgaagagattgaaaaacaggatcatggtgaattgaagagatctatggtacaagccaagaggcaagaaacagaggaaaaagataaaactagagcaatggaaaagaatgagactgtggagagaaggaaacaaactaaagacggtagcttgggaaagcttcgagaaggtgaagatccggaattgggtggacatgagagacgtggggaagaagacaggatcgaggagttagtggaaacagaaataagtgatcacaaagaaaaagtaaagaaaaaagatgaggattatatcttaagaagccaagatactggcaaagtggatttaggtgaacgtgagagacgtagtaagcagagaaagattcataaatcggtggaagacgagataggggatcaagaagatgaagatgcagaggaagctgcagctgtagtgtcaagaaatgagaatggaagttcaagaaaagttcaaaccattgaagaagaatcagaaaaacacaaggaacaaaacaagatccctgaaacaagtaatcctgaagtgaatgaagaagatgaggaaagagttgtcgagaaagagacaaaagaggtagaagcacatgtccaagaacttgaaggaaaaacagagaattgcaaagatgacgatggagaaggaaggagagaagaaagaggcaaacaagggatgacagctgagaatatgttacgccaaagattcaagacaaaaagtgacgatggtattgtgagaaagattcaagagaccaaagaggaagaaccagatgaaaagaaaagtcaagaatcgagtagtcatgtggtaaagctggtggctgaagatggtagccttagaaatggtctagagttttcggaaaaggagtcaactgtgtcaaaaatgctgaaattggatgaatcaaaagagaaagaggaacataagaagatccggaaaccaacggaagagagatcgaatgctcctgtaatagaaaaacaaggaaataagaaaaatgcggaggaggagatgcaagataagattgacagaagaggtaagaatcaagagattaaaggacaagaaccatatggggttctaagaaatggagagcatgacaagatcacagaatatcatagaggggaggaaaagggaacagctgagaatgttagctccacaaagattcagcaaactaaagatgagttagagaaacctcggaaaccaagtgagatttcagaaaatcacaatatccatgaatttatggattcaagccagtctcaagatattgaagaaaaggggtcagatcaggcagagaagtatgcaaaacaaaacaaaattcaagaagtaatgaatgatgaggacaaaaaagaggaatatcatataagtgaaagagtgcggaacgagatggcgaagagaattctgcaggtggagtccaaagctaatgatggtagctcaaaaaagaatgaaactgaaggacaagaatctacgggattgagagggcgaaagaaaagggaaaatcatcaagagctagtggaactagaaactagtgatcagaagaaaggagtgaaagaggatgaggttgttgggaaagcagagataatagaagatgaatatgatagctcaaggaagattcacgaacatgaagaacgtatgtctgataaactagaaatgcatggggaagaagagatgagcgaaaaacttgcagaagaggaaacaagtgatggtgaagaagctaaagaaggaaacagagcagggaaaaaaagcagagatgatggctttggaaaggtaagaaagattgaagtacaaagaaaagacaatgaccaatcatttgtggaaaaggatacaagtggtaaagcaaaagagaatcttaacgatgaagaacctacaaagacagaaacaaaagccacagataatgaatcgagaaagattcaccagatcaaagaacaagggacaagtgaacaagagagacttaaagaacaaggaaggatcaaagaattggtggaagacaggacacatttttgcagagaaaaagagaacagagaaactgaatacgaagatggtagctcaaaaatgattcaagagatagacaaagaagaatcaattgaaccagtggatagagaaacaagtgaagatgacgaagaagagttagaaatcgaatttgaagatgaagaagaagactgggaagctgaagtaattcaagaaacagattcagattcagataatgataaaattagacaaataaaaagaatcagattaggattcaggttagtaggaggatcaacattgtttatgtcacttatagtcatagttattagtatcattcgttccaagagaaacataagatgttacaagttctaaccaaaccacaatatcatcattttattcatacaacttttattaccatgagacggttcacactctttatagaacacaggaagaaacataatcttacaactctaagcctgtttcgttaactcaatgacccacaaatgatatgcactgcatacaaagttgcaacgcggaaaacccgagttagcagccatagctacatactcggcccgcgacctctctttacctccagataattgagtgagcatcaacagatccatatcaaaagcaatgttggatatcacatcacgattatctgcttcatctggagtaactacttccatgacaatcactttcccattctcaggtaatgctttccaacaattcttgagaatcttttcacagtcttcatcagtccagtcatgaagtatacgctgtaaaaaaaaaaaaaaaaaaaaaaacttgagagaaaagtatcattatattagaacagagtaggctttgtggtttggttcttactttcaagaggatagcatcaccttttgggacatcaacaaacatgtctccagctacatgttccacattaggataagaaggagcttgtgttaaagcacaagttagatcaaaattgatacccttaatgtttggatactttgaagtaacaaaaccaagtgtgtcaccaactccacctcctacatcaaccaacacattaactccttcgaaaccactataaacttgtaggatctttttcaaaaccgcgacagagaatccggtccggttaaagagtttgcttaatctctcatctttgctaatatagtcaaagagtttcaaaccaccattggcacggccaaatgcaactcctccttctagtaccacattttttaattctcccctgcaaaaaaacatcaatctccaaattcttgatatatggatctaatattagaaatcgaaagagagtgaatcttgaaaagaaagttaccatgtattgaggaagacggtatcgagagtgacaataagttgagaagcaagtgttcctaattcttcatcaacattatctttcaagaaatatcgacaaatcggctctgctttgtagactctgttaccatcgataatttggcacttgaccatggagtagctagcaagtaaacgaagaatacgatccaacagagctggtgcttcagggttactaggttttgtggggagcctaatagctatctcagaaggtgtgaggaaggaactggatccggtgacgtcatcacgagcagctaagtagagagtgtcgatgacaccgagctcgatggcagctttgaaaaccattgggaaggctgcacagttagctagcctaaccgcagctaaaccaagctcggtctcttcatctccggtttgaggaattaggtgtcccatttttgtgtaatgatcttgtttttttcgaaagtgaggagtttctgtgtctggttttaaagacgaggcttatagagatatttgatgtaaaagatatttcatacgaaattattgctatttaaaataaaataaaataaaagagatagggatattatatacgaaataactgaaccacgttaatcacgcacatataaaaaaaaaaaaagagtttttaccacatgtacaccaaaaaaaattcgctctctctctcttaaattattagatgcataaagttttcgatacatattgaaagattatttacattataaaaaagtggcataatttgtggaaaattgtaaggcttgttaacaagaaaaaaaaaaaaaaaaactcaaggcctgtgagtgattggaaaataaaaaaattggaacatcgtagggatggatccaaatatattaataatttaaatatatatcttatgcaattttttatgttatcatgtttgattctttgctttgaaattatcgatactagatccaaacaagtgttatttttaaaaaatttaggacttgtgaactaatcttacatatattaaatgaatttattaaaatgtatgtacaaaatgtagttaactagttagtctactcagtgccttttttaagatcaaatcgagctctgattaatgattaacctggtgacgtgaacgattcatcagttttaccaatcacatctaaaatagtgtttatgagtttgaatctcgttaactctgaatacataaattccatctccctaagaatattgatcaagtcttgaacgttcgataagtagaacaagttattagttatataaactacccaatgtaagtagtgtctttgtagtttgaaagcgagggagaaaaacgtggacagttttgaaaatggtaagtataccaaattatttggttctgcgttttggtatcggacaaaataaaatattttagtatatattgactagttgtcaccaacattgaaaaacgtgaatcaggagctttcgcatcatttactattttttgtccctaccttttcctgcacaaatggtatgataatattatcatgtatataaacatataacaataatcaattttcaaaataaaataagataatagctttatatgacttccttacaattttgcttataactttttccgtagcgcctctgttttctttcttaagagcttttttaacaacttttataatcgaatgggcttgagcttgtctacagctaattctcaagcccatatttttaacatctgagaagcccggctgtaagcctgtaacactcaaaacaacccagttttaaaccggctcaattccaataaccaaagtaccaaacccaagaaccaaccatctggatctaagaatttcattttggttgaaatctgatctaagattttaatactgaattatcgagatatataaatgtctcgaattgatgtgagtttctgcttaatttactggaatggcggaccaaacgccaatcacttttagtattgaatgggctcaatggctaaacgaacttccaagaatgggtaaatgggctcaatggaaagagttttgatttatcggcccatttttgagccttggtttatcggcccattattttgaggcctacatatttttgtgtgagtttgacaaaaaagtcagggacagagatagtctataatttgcgattctagttcaatttttaatcttccattgatttttatggctgtccagaagtaagaatttaataaataattttcctcaacaaaaaaatgatttgtttagaaactaaacgaaaatttattttatttcaattgattcaagaattttttttcttttttcttttcgtgataatggaagacaaaacgagacaacacgtagtaattacattaaaagaggaagccttgaaatggaaagcatgaaccgtcaaatcttaagcctccactacaggttgttccatacacaagtcatgatcctattttttggtttttaaagataaaataaagttgatgaaacctttcctcaatcaaatgataatactaacacttaaggatttcacggctattaaatcaatcgataatataaaatgaaaggcattatatcgcactagcgcagcaggtccggcttagaggaagtgctgacagtgctagggcacatgctaattatttaccatgcatattattttagttttaacaatgttaatcattgtggcaaggtgagtatatatgtacgtaggcgagtacgtatgcatgttcattgggtgatatactgatttacatatgatgtatatatctagagtatattatgttgttataaagttgttatcataaaaataatatttagagagagtatgaatcgagtggtggtgtatgtacaagtgtggtgatacgtgggtgatgatggtgaaggatggtgctcttcgtgtggcaaccacactcttcctctttctttacttatcaatctctttccattgttttatctcactatatataatttccgcagtgctttccaattcatcaatccatttatttaatatttattttaattattttatatttcaagaaaccctactttaacttgttcactatctatttgttgtttgggtttttcactttcaaacggatattatcgatcgttgtgatcttcaaggatataagaatatgggtatgaataaacatctgattcggtttttatgataaaataactggatcagtgaaacgctttttaagttgtaacagtttaaaccaaacatacaatttaactgcatttcgtaacacacagcaaaacaactcccaaaataatgttggttaacttatatcactgataaagtctaaatttattgataactttttaattcagtataatattacatattttgatatatccattcaaatatgataacttttggtcaaactactaaaatctacattattgataacttttgggtcaaacattactaaaatctaaacttagatgaatagtatacgattgatcttttcttctatttctcctttttttggttcctttttttgtcgagaaaaaaaaggtatatatttaactaccaaaaagaaacgagaaagtaataaagagaaaacaaaattattcaatttataaccaggaaaaaagaaaactgatttgaaaaacgctaccacaaatgagaataatatgagaaaacaaattcatttaatggaaaccaaaattactatgttaacatttgtaaaacttctatgctgagactgataaataccttaataccttatacattagccttcatatatataatatatagttccacttaagttattactttataaaacatgcatgattggcgacgaaaaaaaaaaacatgcatgattggcattacaacatcagtaagtaatgggatcaagttgaaatggatattctcaaattgggttaaaggttgcgtatagtaatggatcaagttgaaatttccttttttcctttatatatgttttgttcttctttttccctataatacatgcatgcctttgatcatgaagaggacaacagcttcttatgcaaccgcctcttttggcctcactaaggatttttattttaattatgttaaatacaaatgggagaaacatataaatggtgagaaacactcaaaatgtggtttcgcatcactttttattttatatattattgtatatatgttttgtttctttaattttttttaattttcgaaccgattgctattttttttataaaaagtaaatttcgtaataaaattaagagtttaaattagagataagttggaaacttcacacttttttcacatataatttgcaaagtaggtagttttttttagaaatagggagaatagacacttttctctttcctctctaatacaactttctatctaatagagattttagtgaatgacctttataaccttttgttgttttgtcatatagtcaaataaagacaaaaataacttttgtttcttcttctctttacttatatatatttagtttgttttgttataaattcttcattaaataattactataaaatatatattaatcttttaaatttttttctgaatctaaaaagtctaattttgctatattttacaaatatataatacttttattttgataataattttgctatattttgctatattgtaaaaaatggtgtacaaataatagtgtacaacgataatgtatattattgatctaagaagtggtatacggtatagacagtgtacaaagtgatgtacaaacgataatatacaacgatgtacaactacataataagatggtgtacgaaaatgtaaaatatggtgtacatgatattaatagtatacatgcaataatgagataataaatcaaaccataaatcaccttctacaccgtctataatatcgtacaccttcacctattgtgtacacctcatattcaaaagataaaaccatttttgtcaagtgataatatacaaaacaaagtttaaataataataatatgagattagtgtacataaaagtgtacaaatgttagtatacataagtaaaaatgtataatcattactttcatttaatggtatacaccattatggttaatttcatagtatacatgatggtgtacaccattatatttttattaatttatgaacaattattattttattttataaatatgagataaatagaaatattttagaacatatgtataaaatgatttggtgtataagtgttagtgtacaaaactatgttttaatgctggtgtaagagaattataattaaaaacatataaatcatcttgtttttggaagaagaaattatttttataaaattcaaaaaaatgaatatgaaaaaaaaataactataatataataaaaataggtctaaatagttaaataatataaaaagtttgatccatattttttcatataaagtaaagggtaaagtggtatttgacatatttttttgtcttttagcttattacacataatctagataatatatagtctgcctaatattatatcacacatgcatgtacaactccctgttatcttataatattcaggtaggtttttggttacagtaaaaagtattcgatcgcaagtaagagtattgtttacaaagctgtagtgccatgtactttttacaaaagcatttcaggtataatgtaactagaaaagataagtgacagtggtatgttccaattctcatcctatatatatacttccatatacgaggcaacaaacgtttagtgttgtacttgtacgtgaatgtaaccggttttactaaacaaataatcttttttaattggttttacaatgttacttttgtgaatatcaaaaatattgtgactggattttggcaatagaaattaaagatgaaaatatgtgtaaaaattctcgtcttatgagaaaaattagtattttagagagagaaaacaattgagatggacttatgagaaaactttgttgcagatttccgtcataaatatgaaaaatttatgtcgttatgcaccgactacaaactaaaaaataatattttcaaggtaacaaattaatggccaaaaaagaaaaacaattagtggtgatgatgatgctccacatattgtctccaccaagccaaaaagtaaaacacaaaaatctccataaatagaactgagcctaggcgtgtgttctccacacttactcgattctctatatatatctcaacaaaacaaaacaaacaaagaaacaatggatcaatcaggtagtaacacgaacatggacatagagaaggaatcaactacatttgattactccaaacgttcccaatggctacgtgcggccgtgctcggagccaacgatggtctagtctccaccgcgtcgttgatgatgggagttggagctgtgaagcatgacgtcaaggcaatgattctctccggattcgcagggatggtggcaggagcttgtagtatggccataggagagttcgtctcagtttactctcagtacgatatagaggtggctcagatggagagagacagtgtggagatagagaaagagaagcttcctagtccgatgcaagccgcggctgcgtctgcccttgcgttttccgcaggtgcgattgtaccgcttttggctgctgcttttgtgaaagagtataagatgaggatcatttcggttgtggtggcggttacggtagctcttatggttttcggatggttaggagcagcgctagggaaggcaccagcggttaggtcatcggctagggttttgtttggaggttggttagctatggcggttacgtttggcttgactaagcttattgggttatatggattgtgaagacatctttttataagattgtaagataagtgttgccgaattctgtagtggatttcggttggaaatacattaaacttaacagtatgtttacggtacgtgaataaactcttttacttcaaatgatcttcatgcaaacaaagattactaaaattaagcgattatgttttagttttaaagatgtaattaaaatttggtgatgtggtttgagagatctgttttacggtggattttggtgttgtaaagatctgttttttttcggggtactttgatatgaagtttctgtagtaatataatgttcaacgtttatgttaatagaactttgaatgaaaaactattttttcctacaaaatactcctaaagagagagaactagcaacatttgagattgatgtcaaaaaaatcaacatttgatattgatgtcaaaaaagcaacatttgagattatgatcacaatattttttgttaatatatcacaatattggatctttaattatcaaatgctacttttgacccccaatttttatttattttttgattttatcaaatgcgactctttttagtgcaaaaacgaaaagaaaaactaaatagtagtcaattagaattgtgaaccaattaaacatttacgaatagacggaagaaataaaacgtttcggaaatataaagtatcatattacatagagtaaagcaatggaccagagtttaatacatatcattcataacaatgaacataacatatcaatgatctcgacaacatttataaagtataaaagagagagctgctttaaaactcttgtcgtatactacaaatcttatgtattatttgcattcatgcttttcacatctccataaaaggaggagcagcttgcttttagttacacattccatattattacgaaatcaaaatatttgttttcaacaaataatcttataatatacgtatattttgataaacgaagatgagctttcaccaaaacttcatgactgtaacttgatattagatgtgataattcatttttgtaagtattttcccttaacggaaactcaagatttgacaccacagagaacatagtaattggacaaaaacatttattcgaatattttcctttgtcaacaaaaatggaaataagtcaaaaaaagcatatataaagatgatatgtggtatatctcaagacccaaggctcttctttcccctgcaatttgccagcatgaaggttcatgaaccaattattcagcacttttcagggagaaagaccaaaaaaagaaagaaaataaaccaaaaacaaaaactctctcttgtctctctttcaaatcttctgtgaaggcttctccgctagaagcaggaagacgaatctatttgttctgcatcgacgcagacacggcataacaaggcatgtgagagtgtttcaagctccaaagtagacatttgaatctcctactgtatcttgaagatgttcttcagtttcactactagcttccattcttccaacgataattcatcctgcaaattagtttgggtttttgatctacatcagttttcctatcaaaatgatgatttaaaaggggaaacaagctcattttctccacttacccggtagttagattttagtatgtcgatagatctcctcgatatgtgactcactagctcatcttccatgtcaaagtgccttccaaacatcttctgttcttcagcattcgaaccaacaatctgtataccaaagaaaccatcgattacgaggcgtgaaactgaaaccgcagcaaacataactcttttcttctctgtaagcaaaagatttgcaaccttgttaaaacagaatgatccaattattacctttattgccaccttgttgcccttctttgcatagtcaacaggcttgtggttattctcaatcgaggcaattcggccaatatcgatgaactctctgccagggacgcaaatgggggttccaatctgaaaacaaacaagacagataagaaagtgtgaaccctagcacttgtgtcatcatgggtgagagttacagagaatgtaggaaattaaaagcatagataccttaagtataccctcgatgacatcaactccaaggactattgggtctttcttattgaacacacagttaggtaaaatctgaaggacacatgggaagactgcctcatcggctgattccttctttttctcctctttgatattctcaatgtaagccttaaacagatcaaatagatgatagatgatatcagcgcagaagatcttaactcccatttcgtctgcaagttcacgagcctctgtagtaactttcacatcaaaagccaaaattgtagcatattccttttttctctcgagcataactcctgccttcattacatccttcttatgcacaggccctatgccaataccacttacaggtatctttacagctggggacttcaagtattcaagcaatgcttctaatgaccctaatgtagacgcttgtacataaactccttcgccacttttgtcaattctgctcaaaaccgactccatatcttccatagccgactccttaattgcctcgatgtcatcatcaggtccaaccacatgcagggcagtaccagcaattgcgtgttcaaggcccttttaaacacaacccaaaaatggttcaggatgtgatctaaacataagtatatttaataaagaatatagaagtccatttcacctgggcagtaatcttgataccctgtgcagcctttatttctttgtaatgcagataagtaccctgaaacatcagaccaggaattctcattgtgtatagaaaaagaacctaggaagtgatttgcatgaaccatatttctggggaataacagtaataaaacacatgaagtggaaatcagaaagtaccttcacccgtaactccttcattggatgcggggtcagtaatgctctaattgttgtgacaataggtccctgaaatatgaggaagaaaatatgatcacttagaaaagttctatgtctacccagtgccatcacttgttcgggtctggatcataagttttttacttgcctgtagcccacaaacgacgatttgatcaccttcatggagttcaccgtttaccaacacaacatcaatcgttgtaccatggccttcaataactttgacctcaagtacagtacactgttcaacaatttcaagaaaagatcagaaatccgcatgctgaagtattgcagaaacaagtgttacctaaagagaaaggaaagagacctgcacttcgtcaacatatgtaagtttctcaaccattgttttctgagcccattgaaccaaccacagcaagagatctgggaccccttctccactgtaatatcaagaaccaacgttacccaattacgtttaggatgaataacttgtctgttacgctgtatattacaaacagtaaatagagattcatacctaatagcactagtaggaacaatactgaaagtgtctcccatgtctttattcttgtaataaagctcagtgttaagtccttgctcctggaactcgtttataatctggaataccaatgaaacaacataatttgaacaacatgtacacaaattgatagctcaaaccatacaataagaaactctagacctataacttacatttttcagcctcaagttaaattcatttataacatctttattttgctgcttcattgccttcacgataggagcattcttgcatgttttccatccatatagcctatccacctggaggaaggtgaagatattattttccatataggttttgcaacagagaaaaaaatcccatcctcgcagaatgacaattagtgttaccttattcaatgcaacaatgaactctgtattcctcatcctcaaaagatttagagattctatggtttgtggctctaacccatgcattatgtccaccaccaaaattgcaaggtcacacaaacttgaacctcttgaccgcagattcgtgaaggactcgtggccaggtgtatcaataactaataaacctggcaccttgagttttgcatcggctttcagttccttggtcctctctcggatgttttcagctgggaaatatgttgcaccaatctgctgagtaatacctccagcctcgccttcctgtacatttgttcctctgatgcaatccaacagctttgtcttaccagtatcgacatgacccatgatgcagcaaatgggagagcggagattttcttcaccctcaatagattcacttggagctaagcctttacccttcttagaggcatcttttgctcgggtagcacgttttgtccgtgtagcatcttccacttcaggtgtagcttttacggcagctattagtggtttgcctgtacctgctggtttagctgttggtttttcagcttcaggttctgtgtagaaatgcaaaagattagacaaaaatcagacaatggatggaacactaggaagaacaaagaactaaattttcatactaacctgaatcatgcgcctttgatatagcatcctttaattctttcttaaccacaggctgagcttcttcctcctcgtcatcaaaatcacctttaaggttaagatcgaccgtaccccagcttttcgcatcccattcatcttcttcgtcatcttcctcaaccccattttcctgagctacatcagcaggtcctgaattttcgtctgtgtttactaactctattaaatcaacctttccagtgtctgttaaacccacttcacctaaagtatcttgttcatctgcttgattctcttttggctctacctcatcttccccctgaacagaagtgtcaatgcctttctggcgagatgattttttcttgttggcgtaaatgggacgctttgaggaagtagcatcaccatcattatctgcaacaggaagacctccaccagcagcaagtaactggttcttaaaagcctccctcttttgagcttcagtcttttgctttgctgttagaagcttgccctctagcttcttcctcaacagtttctccttttccttttcctttctcttacgcttagcctcctcagcttgagcctcaagctcttcctgcctgcggcgctcctcttcctccttcctcaatttttcttcttcttccttcttttttcgctcttcagcttcttgccgacgagcaagagcctcttgcatctctctaacatgtttaggaattttcttctctgctgctttaccctttgcatccttcttcttcggctgtagtggctcagttactgattcttcttgtttttcctccttaacctctacagaagaggttgctgcagcagcagctgctgcttttttctccttctctttctccttcttctttttctttttcttcgcagcagcagtctcttcttctccttccttctcaccagcattctccacaggtgcaactggctcaggctgagctgctttctcttctacaggcgtagatgaagcaggtctttcagcagcaggggtttctccaagtgctgcaagaagtttgtccaaatcttcctcttcctgtactgtccttccactcttgttattcttcttctttttcttactctttccagtttccacaacctccacattcttagtatcagaagttttagtttcgtctgcaactgagtcatcacctactgaggccaaaacactgccgcccttctttttagaagatttcttcttacctgaaaacgttacttcagggctctcttcatcttcaattgtattttcgtcgtctctagagtttgaagcatcagtcccttcttcttcatcgagcaaatcagcggtaaacgagttagtgttcttcttcgaagacttagatgacttctttttcttaccagagaaggtgataggagactcttcttcctcatcttcgtgcacttcctctgtatcatcatcatcactaccaagtgcatcaaaagctgaagcggcaaatgaattaccgccttttttacccttcttagacgcatgcttcttacccgtaaaacttataactggctcatcatctttgtcaccatcagattcattatcctccttctcatcttcatcatcaagcaaggcaaagctaacagaaccaccgcccttcttacctttcgacttcttcttcccaacaaaagctatctcaggaacatcgtctttcacccccgcagccgaaaccttatcagaaaaatcatcatcatcatcctgctgcgtacccttcttattacctttcttacccttcttcttcccagtgataacaacaaccttctcttcctcaactttagactcctcagacaactcagtacctattgagtactcatcgtcatcaatttgagcacctttcttcttagatttagtagcaccaacgagagatgacgcaggaggttgctgctcagcatctccacctcgagcactcggcttcttccgccccattggaaaatttcaggtctggttcagaattggttccgaattcttccgactaatcaataaatcgaggtgaaatttcctacaattcgaacggaaacaaattaggttttctgggatcggcacaacacaatccttttagaaaatgaaaccacaagagagacgaggaagcgatactgtggctaagaggagagaatcgaagaagctttaccttattccggagaggaattaatcgataggctgagctaagtttagagagagagagcgcggcgcggagagagagagagagagagagagagagtagagaaccgagaaatagcgaagctttgagaaaccggcgtgaagcttcctagggttgagctaaacgctgtgtagattttaccgattctaataaaaaaaaattgtgacgtttgttaaatactatttttttctccgttttctttctcgatagtgttattttttcttttaaaataaaagatatgtcatattctttgttataaaatgtaatttctgaatgggattcaacagttgtaattttcacgttttaatatactgaaatctaacttatataattaagacacataaattttattaatatggactaaaataagggaaatcagcatgatttagctgtttaaagtattcatttaaaaaaataatcttctcgcgttatgatttgtttgaaatacttttctaaaacatatccgcatccaatgttttttgtttttggaagtttttaagagagagctttgttaaggcatgagcttctcgattcgtttctctaggaacaaaagaaaacgtaattgcttgaaaagacctaggattgccactcgcgtgcaagggagattgcttgagaccgggtttctctcggagagtcgtggcggtcgttgaaaattttctagtttcgggcaagtcagtgaagtatgatctcactccagctcaggtatcatggaacatgaacctttggcttatctctgatcttgactcatctctctccatcctcaacaatggacacatgcttctttagctgacttttgttagataggcataacattcatgcttgtgtggtttagtagaaacacttttcgactgtctatgattgattcagccattcaggtgagaacggggcagatatattattcctttttcttttgcttttgattttgtgaatttgggcttgttagaagaaaatgattaatgtttgtaaattgggttttgaatattgggcttgggagaggagctttaataattgggctaataatggattggaattagagttgagaaattagattaaaaaaaggattagattagtgatgaagtaagagtttttgctctctctcaaacggctcgctttgattactcacgtaaggtaagcttcttcgattctctcatctcctgtgtcctttgtgccgatcctcaaaaaaaactaatttttttttacctggattgattgattagccggaaagaatttggaaccggctctgtaatttatccatgggtcggaaggagccgagttctcgaggtggagatgatgagcaaccacttgcgtcatctctcgttggttctaaatctgataagaaatctgttcaaattgatgatgatgaatactcaatatgtcttgaggagcctaaagttgaggaaaacaaggttgttatcactgggaagaagaagggtaagaaaaggaataagaagggtacgcagcagcagcaggatgacgacgatgattttgctgataagtttgcggtggaggaagaggttgttccggataatgcttttgtagggaataataagaagtcgaaaggtaaaaaagacggtggctctgttagctttgccctgcttgctgatgaagataacagggaggaagcagaggataatgatatcacgttttcaggtaggaaaaaatcatctaaaaagaagagcagcagtgtcttggcctcaataggtgatgaagaaagtagtcaatctaaaacttctgattctaagagtgtggagcttgtagaatcggcaaggagtaagaaacataagaagaagaacaagagtggaaggacacttcaggaagatgatgatttggacaagcttctggcagaacttggagaaactcctgctgctggaaagcctgcttccgaagaagagaaagatcaagctcagcctgagccagttgcacctgtagagaataccggtgagaaggagaagaggagactgttgagactgctgcagccaagaaaaagaaaaagaagaaggagaaagaaaaggaaaaaaaagcagctgctgctgctgcggcaacctcttctgtagaggctaaggaggaaaaacaagaagaatcagtaactgagccgctacagccgaggaagaaggatgcaaagggtaaagcagcagagaagaaaattcctaaacatgttagagagattcaagaggctcttgcacgtcggcaagaagccaaagagcgaaaaaagaaggaagaagaagaaaaattgaggaaggaggaagaggagcgccgcaggcaggaagagcttgatgctcaagctgaggaggctaagcgtaaaagaaaggaaaaggaaaaggagaaactgttgaggaagaagctagagggcaagcttctaactgcaaagcaaaagagtgaagctcaaaagagggaggcttttaagaaccagctgcttgctgctggtggaggtcttcctgttgcagacgatgatgatgatgctacttcctcaaagcgccccatttatgccaacaagaaaaaatcatctcgccagaaaggcaatgacacttctgtccaggtggaaggtgaggtagagccaaaagaaaaccatgctttaggtgaagttggttcagcagacactgaaaaggttgatttactagagtcagcaaacttaggcgagaaatcaggaggacctgctgatgtagctcaggagaatggggttgaggaagatgatgaatgggatgcaaaaagctgggataatgttgatcttaaaatcagaggtgattttgacgataaagaggaagaagctcagcatgtggttaagaaagaatttaaggcacattattcaggttagtatgatatgtagttctttgctcttcttcctagtgtttaatgtctgttttaatctaattttttgaacttttacagaccatgaaactgaaaagccaacagctaaaccagcaggtatgagcaagctagaaacagctgcggtgaaagctatttctgaagtagaagatgctgctacacagacaaaacgtgctaagaagggtaaatgcttagctccaaatgaatttatagaagaaggtggagaaaaactccgttctatcatttgctgtatcatgggtcatgtcgatagtggtaaaacaaagctgttggattgtatcagaggaacaaatgtacaggaaggtgaggctggaggtataactcagcagattggtgcaacatatttccctgccaaaaacatccgagagaggaccagggaactgaaagccgatgcaaaacttaaggtgcctggtctattggttatcgatacacctggccatgagtccttcactaatctgcggtcaagaggttcaagtttgtgtgaccttgccattttggtggttgacataacgcatggtttacagccgcaaaccatagagtctctaaatcttttgaggatgaggaatacagagttcattattgcattgaataaggtaacactgcttgtcattctgcgaggatgggatttttttctctgttgcaaaacttatatggaaaataatatcttcaccttcctccaggtggataggctatatggatggaaaacatgcaagaatgctcctatcgtgaaggcaatgaagcagcaaaataaagatgttataaatgaatttaacttgaggctgaaaaaagtaagttataggtctagagtttcttattgtatggtttgagctatcaatttgtgtacatgttgttcaaattatgttgtttgattggtattccagattataaacgagttccaggagcaaggactcaacactgagctttattacaagaataaagacatgggagaaactttcagtattgttcctactagtgctattaggtatgagtctctatttactgtttgtaatatacagcgtaacagacaagttattcatcctaaacgtaattgggtaacgttggttcttgatattacagtggagaaggggtcccagatctcttgctgtggttggttcaatgggctcagaaaacaatggttgagaaacttacatatgttgacgaagtgcaggtctctttcctttctctttaggtaacacttgtttctgcaatacttcagcatgcggattctgatcttttcttgaaattgttgaacagtgtactgtacttgaggtcaaagttattgaaggccatggtacaacgattgatgttgtgttggtaaacggtgaactccatgaaggtgatcaaatcgtcgtttgtgggctacaggcaagtaaaaaaactaatgatccaaacaagtaacgcactgggtatacatagaacttagaaaagtgagcttattcttcctcatatttcagggacctattgtcacaacgattagagcattactgactcctcatccaatgaaggagttaagggtgaaggtacttttagatctccacttcatgtctcttgttactgttttttcctcgagtaacatacattatgcaaattgttgccgatgtcaatttttttaacacacatcaaaaagtgttgttttgatgttgcagggtacttatctgcatcacaaagaaataaaggctgcacaaggcatcaaaattactgcccaggtgaaatggactaactctactataatctttgtcactagcagctggtattaaatatactgacgtttagatgatatcctaaatattttgggttgtgtttaaaagggccttgaacacgcaattgctggtacttccctgcatgtggttggacctgatgatgacatcgaggcaatgaaggagtcggctatggaagatatggaatcggttttgagcaggattgacaaaagtggtgaaggagtttatgtacaaacgtctacattagggtcattagaagcattgcttgaattcttgaagaccccagctgtaaatatacctgtcagtggtattgggatagggcctgtgcataagaaggatataatgaaggctggagtgatgctcgagaagaaaaaggaatatgctacaattttggcttttgatgtgaaagtgactacagaggctcgtgaacttgcagacgaaatgggagtaaaaatcttctgcgctgatatcatctatcagttattcaatcagtttcaggtttacattgagaatatcaaagaggagaaaaagaaggaatcagccggtgaggcagtcttcccatgtgtccttcagattttacctaactgtgtgttcaataagagagacccaataatccttggagttaaggtccacgacggtatacttaaggtatcctattcttactctgctatattctcggtaacttgctcacatgtcataggattctcactccttttaacattcgtcttgtttgttttagatcggaacccccatttgcgtcccgggcagagagttcacagatattggccgcattgcctctattgagaacaaccacaagcctgttgactatgcagagaagggcgacgaggtggcgattaaggtaataaggggatcattcccttcaacaacctttgtatagagagagagagagagagagacaaaagttgctgaggtttcaacttgatgcttttctctggttatataacagattgttgcttcaaatcgcgaagaacagaagatgtttggaaggcattttgacatggaagatgagcttgtgagtcacatttcgaggagatctatcgacatactcaaagctgactacatggtaagtcgaggataagataagttgtttcccatctacgttttctttgaaccaaaacaaatgctcgaaattaaaaccaataacaacaattgcagaaagaaatgtcgacagagaaatggaagctcctattgaaactgaagagaatcttcaagattccctgaacagtcaaatgtctactctagagcttaaaacactcgcgggccttgttgttacgtcgtgtctgctgcataacgaagcgatttatcttcctgattcgtttttttaataactatattaggctgaaatttgtaaccctgttaattaatttagccaatatcaagaaaactcttaataggtaatactgaaattatataatcttattgaaattctaaattctcatataaagcatgttatttcgttaaagagagtttgttacagactctgacttatatagaggcctcttgaacccggtctacacactaaaccttaattagggttaactcaaccgagctacaatcatcatatacagtatattattagtatatatcttcaaataataaccgggaagaaaatgtgatgcaaaatttaaataatgatgactaaagtagcaagatgaattggtgcacacaaaaaaaaaagtagctagatgataaaaaaaagttatagctaagcccaggctgtgatttgctctactattttcaaattatacaaaactgaaagcaatacaaaatggaaagtaaatgaagtggagactagtttttttttgttcttgtttttttcccaatttaatcatttttatttactcactaaataagtaattaaaaattaaggagagatgggttggttatattattatataatatcaacaaatataagaatataatgtagtttttattacttaaattatcgaaatttgtataatcttattaaaagttaaattctcacataaagcatacaatcttcagtgaaaagagataaatagaaaacaattgacgacttaagttttaaaacctccttttcaacaatttgtacaaagaattagagtgaaaactgaaaacctttaaaaagataaaacgtgtttctatgaataaattgattttgtagtagacgactggatgtggacgatgaaagaaaacctttcaagtcacgcttaacattaattctctctgctagcttagtcattatacatgagttagttttgacgtatgaaaccattctttcttcttgcaattctgtacaaagaggtaaagtgaaaaccttctacaaaaaaagttaactcgttatccatatttggacgtgggattcaattgaattcgaagaactaaaacatacgaggaaataaaatctgtcaatttcatgcttgacattcaagaatccctatgctgattggccaacatttgtagtaagtttttcttattttcttatggagaaaggtattttagaatcacataccttatttaggagggaagctgtttatgatcgatagacgacccattcatttaagagagggtaatacaaagtgcttaattaacaagtgtgaggagaaacattagatattggaatatatttttatggctatcattaccatgccttttgttgcggtattctatgaaaaggaccacgtacgtagagaattccatgcaattagtagctagatgataaaagcattataattaattaatttaattaggagtaagaaaattctgaatactacttataatactggtcattattatcttattaaaataccaaattctcacattaagcatgtatacaatctccaatgaataaccgaaaagaaaaaaataaataaaatataactataaagaattggtgactatgaataaattgaagaattattttacaaaaaattaaagtggaaactgaaaacctgtgtttctatgaataaattgattttgtggtagacgactagatgtgtgcgatgaaagaaaaccttgtaagtcacgcttaacaatgaatctctctctgctaaattagtcattaaaatgagtaagttttgacgtgtaatagtaataccatatatattttcttctcttgcaattttctgtacaaagaaagaggtaaagtgaaaagctttctaaaaacatccacattttcacgtgggattcaattgtaagcgaagaacttaaagagtaggaggaaataaaatctgtcaatttcattcttcacaatgttgacatccaataatctctacgttgattggccaacatttcaagtaagttttttacgtgtggaagaatatactatttctccttgtggttttagatgtagttgacatgcatgaaatgaaattaaagatggacgcgttaattaaaaaaaaaatcaacaagttaactcacgacattggtaacaaactctgaggtttcctataaattccatctcactcagtctcataacacatatattttatttaaagaaaataaacttagcataagaaaaatatcgttagattagagattaaatggagggaattacaagtttcgaaaatcttcctgaagaactaaaaagggagattctgttacggatgtctcccaattcccttgtgacatgtagccgcgtctcgaagaaattggcatctatgatccgtacgaaaagcttcaaagaactctacttgagccgatcgatgagatgcccccgagtgttgttcgccgccaatggtacaataacacctcatgtgttgtttacctcgtttcaagaaaaggagaaaccactcttgtcttctggagaacaacggatcatcacctctcttcaaggagaatttctgttttctccacccgtccgtgggttgatctgccttgtagaacgagaatcagctcgaattgtgatatgcaatcccggtacgacaaaatttctggctttaccaatcgtcgaagcagatgaaacaacgaggatcataactcatttaggatacgatgaacagaaggatgtattcaaggtgttatgtacaaggacaaagcccgaaactccacatcttgttttgacggtgggatcgggtaaagaaccttggcgagagatagtatgcaaatttccgcacacagtaattggtgctggagtattttacagaggaactttatactatcttgctgcttttcactcgaaaagtatcataatgaccttcgacgtcaggtctgaaacttttatgcccattacatcacctgatggagtcgatttgaatcaaggttcctggagacttgtcaattacagtcaacaggggggatttgcgttagtgaatgaatcaagaggtttcatttaccaatcgaatggcggcgatgcttatcttgaaacgtgggtttggaatgtcgatacaagaaaatggtcgatgaactccatcctgattcgtaaatggaaagattatgctcaagacaatgaagattatgactaccgtttccgaggaacccaaggaacatacgaacttgtttttgcaccaatcagggttaaagaagacggatcactcactgtcatcttatacaatactgatacacaagcattcagaagatctaaggttcaaatgatgggtgaaggtcatgagtttcgatttgtggacaccttcttggatcatgttgatagtactctgcttatatgaagatcaagagttggtctgtattcattaaactggttggttgctcaagctaaatattctctttaagtactagtactatgcttatttagtgggattgttctttcgtattcgcttctattgtccttgttaatctttatttatgatgttgctaaataataataatgttgcctctcaagtactggtcttattgggattgctagttttcatttctatataatttagttaaactttatttatgctatataataatgttttcattctggtattagttggattggtggtaaatgattgttcagctctttgtagtttgtgcgaaatgatcgttcgtctttcactcagatggaactttcattagagagccttttgatgaaacaaaagttttattaagttttataggtcagcctcagtactcaacccaaaaagttgtaaaatctattaagataacagaggaggaactaagtcaaatcttttggcacaaaagagtactatttacacacttgtatagacatattactcttctgttttacaactagcagtaattcgaccaaaagactgaacaaatgtttcaattccaataaaggactcatctacgactaataccatgcaacatacatatttccttaatcacatccatcataatagtgtcttgctcatgtttctcttcatgttatccttccaaaggttcagaatccacctcttgatgagtgttacttaccggtgaaatatgacctgaaacttttagtgtaaaaaaccataacatgttttgtagctttggtttcagatgtatgagtaagtcctcctcctcagccattccttgtggcttttcttttacgaattcttgattcactgtcttcatttattcggaagagcctcttgactttagtgccgactgcttcttctagctccaactgagtgtactcatccataagtttttctggtgttagattcagacaatgaccaacactcgcacaaccgactttagttatctccattctttcttctgcactgttgttctaagtgttgtgttcaaaaaagtttccatgtaaagttgctgcttgtacttccttctctaaggaacctttcacatcatcatctttgtttgagtgaatctccttccaacattcaactgagttttccaagattgctgtgattaaaatcagaaagaaacacggattagaacaaaattagtttagccataaaactgaaaaagtaactcaaatcaaatgaatacaagtatataccttctatagagctacactctcagatctaggagtgcaaataagagtttctctcttagttttggtagttttctcagcaatagatattgaaacgatattcttaacaaggtaacggccagtagacacgactagctcagcttcagtgctgctcactggtacttgcactgaagcaggtgataagcgcttgacaaaaagtacagagtgtgatgatacttcctctttgtcctccttaactgcagatattaaaactgtgtctcgctcaattttctcttcacgttgtccttccataagttcagaattcaactctttagtgcttattatttgagaaactatcaactggtttttccagtgtagaatccagaacattctcataatcataacagatcctgcacctttggtttctgaggaaataaggtgaatcatcaatcattccttatggcttatccttaatgcactcttgattcattttcttcaactactattggagcctcaaatgaattatgtctcgaagagttccttgtcaatctaacatttagcttcttgaatcttgacattttcaacagaggctccatttcgttcacagtcaatactggaacaacttttctgtgaattactcattgcttccagtattcaaaatgtatatctcagagaaggacaaatcacgtcgcaacgtaataattttttgcaaataatctaaattaatctaagagtcatttttgaggataaaatcgagttactgacatcttgtgtgtctgtccttcataccaaattatccggtcaaaaagccaccacaccggaaaatattattttcttatcatcgccatgttttgatttttccacgtttacaccttttaatctaaaaatcaatatttctggaagaaaaaaaaaaacaaattaaaattgtcacacaaatcacaaactgaaatctcaaaatcgaaactaaagcttctcagatctctaactatagctcaaggcggaggagactgagatcgatcatctgaatcgccgaaacatgtcgagcgatagcaatgatcttgacgaagatgagcttcttcaaatggcgttgaaagagcaggctaagagagatctcacctatcagaaacctccttcatcttctgctcgtaagcctgttgccaatttagtgcagcagcctcgacagcagaagcctgtggctgcggctgccgctccgccgaagaagtctgctgcggcggttaggaagccttccatggatgaggatgaggagtcggaggtggaattgcttagcatttcgagcggggatgatgatttggagagggaaagggaaataggtggttctagtggtggtgcggggagaggaagaggtagcgatgtacgagagaagggaagagcgaggaaggaagatgatggtgcttgggatggaggagagcctgattgttggaaacgggttaatgaagctgaggtatgtatttgtggcgagattcatcagtgaatgcttatggctttgcttgttcgatcaagttcaagagtttgaattcgatatattgatctatttgttgaattgtacgacactgaacaataccattcgtgggatacggtgaatgctatccatagtttctggtgttgagttgatatagagagcttgataattagcatgccattagtgattttagaaccatagcatcatatggatgtataagtggaaagatgaccattttcactgaaattccggtggcattttggcagcttgctcgtagggttcgtgatatgagggaatcgagaacagcacccgtggttcagaaagtagaaggtaaagcacctgcacctgggaagaaagtggctctgactagtttgcagtcacttcctcgtggaatggaatgtattgatccactaaaattagggtaattgctctcgtttcgttttgcttaccatggaagccagtcagatgctttgtactctgtctttgatatggtagaacatatctaaacctgaatttgtctacttcataggatcatagacaataagacattgagattaatcactgagtcgtcaggcagcccatcaaaagctgagaaagtggataatactcttcgcggtatgtctttctttaccatatctacaactcgagtgaacagtagcacttacaattttttggagggctaattcgatgtacaatttccagttgtctaattgttatgtatctttttctgagtatttgcagaaaaattggtttacttctctgatcatttcgatccgaagctgtttctttcccgtattcaccaagacacgactgcagcagatttggaggctggtgcccttggcttgaaaagtgacttaaagggtcggaatctgcaaaggaaacaattggtgaaggacaattttgactgcttcgtctcatgtaaaacaacaattgatggtatgtattattacttccaactgaataatttatgtttttttcttctttcattttcatgttgaccactgattttcttaatagatattgagtcaaaactgaagcggattgaagaagaccccgaaggttcaggaactactcatttgtttaattgtatgaaaagtgtgacatcgagggccaatcttgcatttgagccactttttgagagacaggttggtgtgattctgatttacttcttttgcttgtcactctctttcattttgctgaagcctttttcaaaatcacatttaggctcaagctgagaaaatcaggtctgtccaaggaatgcttcagagattccggacactgttcaatttacccagtatcattcgtagcagtattagcaagggtgaatatgatttggctgttcgagaatacaagaaggcgaaatctattgctctaccttctcatgtatgcctgaattttcaatcacactctcttgagacagatcctatccacattcctataagcactgagccttctttttattacgatttaatttaattacataacaaggctcttgacaatatagaaaaacaagctgctttcaggttaatatactcaagcgtgtactcgaggaggttgagaaagttatgctggaatttaaaggcacactatacaagtctatggaagatccgaaaatagactttacaagtgtatgtcagttataattcattttattttaatgtcaactagtaattaaactgaacaatccttcattcaaatattcaccaaatgcattaaccatactactgatatcatgtcaatattgcagccatcatgaatgttaacttttatttaggatatcccgttttacattttcccagttgttgtacctactaaataaaatgactaaatttttttccagtctatttttttgtcttgatatctgaggtctgttcttattttagctggaaaacactgtgaggcttttgctggagctggaacccgaatctgatcctgtgtggcattatctaaatgttcaggtcggtatattcgaagatgtcactcttttactacttcttactatgttctgtgtggaatctggattcctaatagatttgctttgagtatcagagtgacttttagcttataaaatctttcatttgtttcaacttagcacatttatatgtctcctacactttttgttgcaatcctcgtgtattttcataattggctctttaattacagaatcatagaatccacggcttgcttgagaaatgtacatatgatcatgaagcaagggtggaaattttgcgtaacgacactcatgagaaagccatctcagatgcaaagtggcaacaaattcaacaaaatggcgtttcatatgtgagtctagcattgagaatgatatatcattaaaagactattcaatattcagttctttagatgataacgtgccttgttttttcatcctctagtcagataccgcctcttctaatgaaaataatgcagttcaagttgacctacaatcagtggaattc

SEQ ID NO: 138 - DNA, 96642 bp, Arabidopsis thaliana
gaattcaaatataaagtgaagtccaatcaaagggatatgattttgctacaaaaggatagaaaagctttatgagtttgagacttgtcgtttccgcatagatttgcactaatgaacttattgtggctggcagccaaacacatctgtgtgactttcgatattagtaataaagagtttaaatagttacgttggtttaagaaaagtttacaaatttgatttcatctttgggcagatagccatcaattattttattaatctacatttaaagattgttttaagagaaaccaaagttgaataatctcatcaaagaacggtaggtaaaccctaccaaatttaacaacccttaaaaccattttctgtattcacattcattttttgttatactcatcatggactttttttttttgttttggtaaaaaacatgtacatatttagatgctatcaacaacatgaatgacttacaagttaagaaacaaatctctttttttttttgggataaaaagaaacataaatcttaccaagagataatctctacaaaattgttttttcaggatatttccaagaaatgagaggaggtcaacgactaaaaacaacttgctgaatatttaaaaatctttttctgcttagtggaggcatttattttacattaatttttatgttttaaaaacataatgttattatataattaaatttcttgcacaaacagagaatattattaatatatactgtgaagagtaataaaacagtttcgtttcattaaatatttgattgaattataaaaatagtgaaaaaatagaagatgtgttcgtgttcgtggagcggaggacaacgtagttggtttccgcgtgctgtacgagacagataacttctacagagagaaacaaagatcgagacaaaaagaaacccttaaaggatttgaacggagaagacgaggaaaaacaaagacacaactctgtaagttctgacccaattttttttatgttttgtctggaaagtttcaagatttgatttttgtggttctctttacattttctgggttttgtgtaagcatttgatgtgtggagtgtctctctttttgttattcgaattcattatcaatcttttgtgtgtgtttcatgtagatttgctcaatttttaatctagatctaaccaaattaattaactaaagatttagataagaaaagccctaatttgtgatctactatatgatccagaatctggagtctttgtttctacttgatatatgtaaatcttgaaagtttccttttttttttcttctcttcttgaagtagtaaagactttatcttttctcaattgaatccaagaatgattagagggtttatttattttgggaccaataaacagactttgttcttgggggcagagactgtttctttcccttttcttttttttcacttctttagaagattcttcatttgaattctgtccttcaattttgaagttgtcttgttctcttttttactaaatgtgaatcaaaagaatgttttcttaagttttaaaaaagcctgtggtggttactgcttttggtccattgataagaagaatcttcttttcttctcttctcttctcttctcttctcttccgtgtcattgctttgttattaagtatcattcagaatttgaatcaaaactctacttttgtgtcttgcagaacctttagagagagaaaaacaaatgtcgttccgtagcatagttcgtgatgtgagagatagtataggaagtctatcgaggcgtagtttcgactttaagttaagcagcttgaacaaagaaggtggtaaatcccgtggttcggttcaagattctcatgaggaacaacttgtagtaacgattcaagaaacaccgtgggcgaatctacctccagagttattacgtgatgtgatcaaaagacttgaagagagtgaaagtgtgtggcctgctcgtagacatgttgttgcttgtgcttctgtttgcaggtcatggagagatatgtgtaaagagattgttcaaagtccggagctctcaggcaaaatcacatttcctgtttcgttgaaacaggttagatttcaattctttactaatgtcatcatcacatatgttttggttagtcttatgattggttatttcaagtaatttcttcttcggtgtttatagcctggaccaagagatgcaacaatgcaatgctttatcaaaagggataaatctaacttgacttatcatttatatctttgtctcagtcctggtaaaacttcattttctctgtttttgttccaagtttttctctgttctccaaagcaaatctgaaagcatgaatatttgcagctttgttggttgagaatggaaagtttcttctttctgcaaaacgcataagaagaactacatacaccgagtacgtgatctctatgcacgccgacaccatttcgagatcaagcaatacctacattggcaaaatcaggtaataggaaagactttgcctagttataagacatttagaaagcgaatgtgctaatgtttccggcttaacgcgtgattatctcctctttggcaggtctaattttctggggacgaagtttataatatacgatacacaaccagcatacaacagcaacatcgctcgagcggtccaaccggtaggtcttagccgcagattctactcaaagagagtctctcccaaagtacctagtgggagctacaaaattgcgcaggtttcttatgagctaaacgttcttggtacccgtggtccgaggagaatgcattgtgcgatgaactcaattcccgcctcttcccttgcggaaggcggaactgtgcctggacagcccgatatcattgtcccgcgctctattctcgacgaatcgttccgcagcattacctcttcgtcatcgagaaaaatcacttacgattactcgaatgattttagcagtgcacggttttccgacattcttggcccgttaagcgaagaccaagaagtggtattagaagaagggaaagagcggaattcgccaccacttgtgcttaagaacaagccgccgaggtggcatgaacagcttcagtgttggtgtttaaacttcaggggacgtgtaacagtcgcatcagttaagaactttcagctcattgcagcaaaccaaccacagcctcagcctcagcctcaaccgcaacctcaacccctaactcagccgcaaccgtctggtcagaccgatggtcccgacaagatcatattgcagtttgggaaagtgggaaaagacatgttcacgatggatttccggtatccgctctctgcgtttcaggctttcgctatctgtttgagcagtttcgacacaaaacttgcttgcgaataagtcaaaaactcagctttgtatgtaatgttatcagatttgctttggagattcttgttttgtggtgttttattttcaccgagaatctcataattagatttgtttcaagctttcattgcttatgctgtttattggtgcaaccaaaaagtttattcgagtttggtttttctccatagtttgatttgtattcataacggtcaaaaacataaaacgaaaataacaataaatcattaagaagcattggttattgaaatatatgatatatctccgattttcacattgataacaagtttgatattagaaaaaaaaggataatatataagaacaaaaaatggacaaactgttttatgtaaaacatcaaattatgttaagggcaggaaaggagagatgagagagcaaatgacagacactgagaagtgagcacactgcttgccgacttgaggtcagagcaggttttagaaaacggcaagcattccttgtttggaaaagctagatggcatataaccagcgttatttgttaccacggtggtacgtacggaccgacgcgacttcccgttagaagaaacatcggatgatatgaaacacgccctcacgtatgtgaaagacagaaatttcaatggctgtcttcgagatttatagttactttttcgacatttttaattgtattagttgtagattatattagtgtcaaactattgtattatattcatctagaattctatagtttaaaagaccaatcgtctgtcaataaggtgtgaagagtccatcaagtagagagatccatcccacgttagcacatcattttaaatttacgttctttatgaaacattttgttcaagttcttgaatagtttcgataggtggtttaaataaaagtaattaatgccaaggaagtatgcttgtgtttatttccacgaacaaaagatatgattcagcccttttttgttgttaatatatttatttggtggtcgaattcgaactcacaatgtcataaaagtttagccaaacttgttaatgaatattggtgatcttgttttggaggtgtggaccaatcaaacaacaaatcaaccactatgtgtggatttttgcgaggaaaataaaatgattggataattaaaataagaattgacctaactacgatagttatagtttaattaaccaagttatgtgacataatccatttcttaaagtataatttcatctcatcttggtgatccaaaaggcaaaaatgtatttgaagggccatatcggatagtcgtctttaaaagggtcaatgactcaatgtggctcagttctagttgccgcttttgattagtaaagatcagtaagattttaatttcattttctaaacagatatctgataagtgataagctaaatcataagactaatttggtctataaaattgtactattttccttggtcagacatgattcgttttcttttggacctttttgaaaacaacattaagattattttcttcttaaccgatcttaatcaagaaagtgtattatgaatcttagtttgcaaatgacatattatcctttatcgagcacgtcaatattgaacgtcaaattaatcacggtatgaggtttatgtatgtgtttaaatatattgtcaactagctacaagagtggtgaagcactaaatcacaccaccaaagcttgtgacttggttgtgattactctcatgatctattgtaatcttgttgtcagcgttttgcattctaaaattctattacaaggactaaaacatgcaatacagtgatttaataagtaagatttgcttaaaacaagcacaacacatgtaaattgttaatcgaatgttttctgcggctaaagcctgaatatgggaaactcaaactgtttgatagattttcgactcttgatccatatctctagcccaaaatgttaaccaatagagaagaccagcagcgtatttgtaacttggttgtacatgttcaacaaaaacacaagttttgttcactaaaatttgctagcaaaaagtgccaactcatgaataaattcagcatcgctttttttttctctggctaagaagtagtggtgaatgatccaatatggaacgggtaatccaatatcattaggaattgtaatgaagcattcttctcgtcttgatcatcgcatcaaaacattaaggtaaaactcgttacctttttgattccatcaactgagaaagcagcattgcagaaaatgaaagaactttagaggggaatggaatcaaaaagctaacgaaagaaaacaagttagatgcaatagtggcacgtggttcaactttgagctctgtcctcgccattggagagtatcctcggtttcaaaagttttgtatgatacataaaattatgaccgttattacgcagtaggagaaatatgaccgttattaaactttcttaataacgtttcaattgtttaacagcataattaaataaaagaaaacaacgtaaccctagtcagaaagagattaaaaaaaaggaaaatcagtcaaaagtttcctttttgttttgtgtaaaccgcttataaatactcgctcgatcactcatctcttcttccttgagaaatcaaaaatttctgcacgctccttcttcttcttccacacggaaaagaaaaccctagcgttttcaagttctctgtttttatatagaggatcgccgatgatcctttctgatatagaggtaagtcgatgatctcttctaaaaattcactcttcgtctcagaacatatccgtaaggtttgatcggaggaaaaagcatcttctgtctccggttaatcgagaacgattaaaggtcggatctttaaattaacttcccctgttattagtaattcgttagcatggacgagcagcagtttcgattaggattccatttttggtctgaattcttgtatatcttgaggattgaaattaggaagattttgcgtttgattaggatattgagagacacacttagattgctgatatctggagcagtcaagagaggtggagacggaaacctaggcctgtaattacgcggatgctgcattggacggaaaccgttaccaatataggacgatgcagagtctctggtcgaggaggatcagagttagggtaaggttatctaggagggaaaggaccaggtcgaggaggataagtgattttgattctgaggattagtcatgacattaccagggaaagtgttagcattgctagagggtaagttgggaggatgtctgctagtggaaacagatggctcgctactgcaaagaactcatgtgggtctttcttaaagtgtatcctttgagtgttctgttgttgctgacggtaattattgttcggctgatgatttgatggttttggaacatatttgaccttggatttgttgtcaaagactctcctggagtcggaatttgaatccagaggttagggtatactcgtctggttcgcaacaagttgtaagctttcggctcgtgtaagagggattcctccagcagagaggcttgtccaaagccacacactctttgcagcatgaaaacattgtaccgttgtacagatgctttgagaggctttgccaaaaaaacattgtaacgtctcattctcaatccgtgaagagcagttttggctttctttgttcaggatgacgaagatgcaaaactcatcgactttcttcgtcgagaaacaacagggcagagaacggctaaagactcaccacatcaatgggccttatcaatgggctttgctgtgaggccctccttcctacccaagtccaaccaggtatccttttctttatttctttttctttttaataataattttgatttccttacaaatgtttttaacttatatttttttactactattaaaaaaagttgttttgataagtgttatatttttaaattttgtgtaaactaattggacacaacatccaaacccctaagaggtgtcctaggttcaatatggtttacacttaatttaaatttttaacacttgtttttgttttattaaaaaaatgtttttaaaattatttatatattactactaaaacattaagcatcatgtctttttgatctctaaatttggtgtcataagtttaacatgtttttcaggtattacaaaatttaacatttagttacgttttaaggtttttgatgaataatgttttaagtaagtttttgatgaaaatttcgttttaagttttaaggtttttcacaaataatattattttttccgtaagataatggaacgtgttagtttatacatttaagtattttgcttacatacatgaaagttatggaagaaagaatatttttcgataggacatggaaaacatcaagccgtttacttagatttattttcattttcgactataacaaaagtacccgcagttacaatatctcccaaataatcgtgtagccctcggttttcacaaattggtagtgaaacaacaaatattgtcttatatattccatcatcttccacttctccgtacttgagcacacgctctttgatgtccgtcatgattagaatttcgaacccctaaacattaagagaagagaaagaaaatgcacttgaacctaaatattgcctgaagtttctaatatgtaaagaaaaacctaaataaatcagaatgggcctttttgttatggattagaacctcaaaagcccatgaacctaataatttacagtatttacgtacaagggtataatagacaatttgcatatgaagccctaatttcatcgtctttatctaaccttgaaacttcaatcccagatttgtttcctggcttccttctcgccgattagctatttttgtttctagtttattgaaattttgcttggtaattgtttttttgtttgtttctagtttatcaaatctttgttaggtaatggttttttttctaaaaaacttgaatccgatcttcttttatcgtttctgcaattttggtttgttgttgtttgatttgcccaatgatgcataaaattatgttatagagcggttgtatttgggtaatctccggcgtgttgttttaacctaatagccttgaacgccgtcgtttcgtctccgacgacattcacacgcgcacacttccacccttaccatctatccgtctcacacgtgcgtcggatgcgaaacggtggtgttcagggattttttaggttgccggattttacccatttactctaagccgtgaatgatcaaatttatagctatgagatctgagggctttgttttttaattaaagtttcggtttttatgttttggtttgtctttgcccattgatgtaagaaatcatttctgagtggtgccctggtttttgaatgttcttctcgtagttaccattgttgctcctcatcatcattatcatcatcatcatctcaacagtcttcttcttcttcttcttcctctgcttcttgtgttctctgctgctgctgctactactggtttcttgcaatggtaactttgagtatatttgaaaacctgattttgatgcgccgtatatgacagatttttgtgaatactgagggctatttttcttttatcactaatctttgttgtttggtattgatgtagttaatcatttgtagttgtatgttgttatttttggtgagatttaagccctgtgatgatgactctaatgagtttgagtggtgccgcttggttttttcttgctgagactcattatctttgttgctgctcctgcttctctgtctctgtctctctttctctctctctctctctctctctctatatatatatatatatacacatacacacatacatgtttggttgcagcgatggagatatgatcttaatggtctttggcatagaagaagccaatgcgttgtgccatctatgactaagttgtaaaacaattgtcttttaagacctgagggcttgattctctgtttttttctttcttaatttgtctattactgaaagtgaaggagtttgaaattttgggttttaatctgtccaatcgttgttctcatatctatcagttctagtcaatagatatctggtttctatgttagtaatattgattctttaaagtcggaaaattaaatcctagacgctgaagcgttggagcaaacattcgagattgtttggactgcttaagaactgcggctaatgcttaattgatatcttaacaaggcttgagcctcagggtagtggtgtattgagcgtattaccaagtttgatcctttgtttctcgctgttacgcgagatagtaaaattgtaacccttgagatggctttgttcagaaacgggttaactagactagttggcccaatatacatatttacctcagcttgattaaatgcccgtgaactgaacttgaagatctgagaacttaacactataagacccgatggcatgaaacattatcagcttttggattattttgtcataaattaagcaaacaatatccaaaaaagtgtggagactggacatcttcttataagtcttcttccgaattctctttaggtgttaagggctttattacacgtggacgcatacatttctgttgccataatattttcaaagtattactgaattgataaaacaattatggttgtgttcaatactctattggctagattttcctgctttttaaggatatttgatttgttagaagagatgaaattgtctaagaccatacatcaaaatctttctatctttttcttgttttggtgaaatgatctttctctaagcagttttttcatctttacatgttacatttagaatttcaccaacaataaaatgttcaaatccatttccgagcctaagctaatataggaaaaagtagccggaaattgttttggaccgacccgataaacaacaaggccgacatagcctcttgtttctatgcgtacgatttaataatgcaaccatgaaactagaatttcaatactataattttattataaattcattcttttttttttacaggtaaccagagctggtgtaagttgtgccgttcaatgctttacaaattattgattgctaatttattaataactagattttaatctgcggtacaccgcgagaataatttattttttaaattaatatatataaaagtttgcaaattgtatatttctataaaatgtttttattttatagtttacaattgttattaagtaacgttctgtcaaatctgtcccgccaactcgtcctgtaaaaaaaactcatttattttattaatgttgatcttacttatgatatgtttatgaattattgtctaaatattttgtaattttgtagtaattaaatgctatcaaatatctatgcggcttcatgattataatcatgccgaaaagcaatatcaaaaacgataattttgtagtaattaaatgatattaaatattttggaagttttattttagtaattaattgtgtagttaaagtagaaagattttgagaagattgttaaatatcaaatatttaattagaagattttctttctaattataaaaaataattattaaatgtcagtgacagccattgtaaataaatcttaactccatgacttatttcacaaaatgactgtaaaaatatatatatagatattaagtaggtttaaacaattatgaatctatgaaaaatgcgtatgtcgagtctttctaatacaaaacttcatacaaataatgaccaaagagaatataaaatagtcaattatgaaaatattcaaatgataagcagacaagtaggtgactcagcgcattaagcaacccaaggacaaaatgggaactatatattatttcccttttcttcaccactctccttccgatacccaaaaccggaaccaatgacaacgcataccaatggcgcattctcatacttttccgattttaccctttagttttcccacaattctcgattagaccatttctctccgccgccgaaacctacggagaaggaagagaaaaaccatggaatcgtctccggtaaactgtcttccacctgattctctccaccagatcttctcatctcttcctattcgtgatatcatgatctgcagatccgtctgcaagttcttcaaccagcttttgacctctcagtgtttcatagagattatctcaactcgtccgccgttgaatctactcgctctccgacctcctcatcaccaccacagtcaccgtcacagcggaaacggacacgcaacgaatatccgaccgtacatccatgtatatgatccagagcagaatcaatggttcagattcaatctcgatttcctccctttccgatctcctcagcctgtagcttcttcaagcggattgatctatctttggggagattcgattgatttagctgaatctagcaaatcgctcgtcgcttgtaatccgttaactcggcagttcaaggttttgcctcagcttggctcagcttggtcacgccatggtactgttcttgttgattcggtgaatcgagtcatggtgctcactgagctcgctgcgttgtattactcaggtactgtagttgctaaccaatggctcaaattctcgtcgaatttaccatcgaaacctagaagtcctgtgttaatgtctagctcggttttcgcattgtgtgatgttggatctccatggagaagtcaatggaagcttttctcatgtaaattgacgaatctcacaatcactcataccaattgggtttgcttggagaaacatgaatggggtgatatattcgatatcatcaaacgaccgcgtttattgcgcggtaacggtgattctaagcttcttatgatcggtggattgaaatcgacgttttcgttgaacccggcttgttcaacgattctgatacttaggcttgatctagaaagcttggagtgggaagaagcaggtagaatgccgttagagatgtaccgaggttttcaagaatcgagtaagtttaaagtttttggaggtggagatagggtttacttctctgctaaaaggatggggaagcttgcaatgtgggattgttggcaaggttggagatggattgagggcgtccctggttatgcagatggattgtgtcgaggttttgtgtttgatgctaagcttacattgatgccatgacaacagaaaaaaaggtccgtttgtgttcgttgcgcattattattccatagaaggaaggaatctgtatctctctgtttatgattatttactgattttctgtatttgattgtatgaatgtatctgcttctttgttgttactgttcttaagctgttgtatcactgtttctctatgtgctttgtgtttgttttcttgtaatccagactgtttgtaaaactgttaaatggaatgtgatacgattgtagtcttgctttgtgattgccttaagcttcaacctttgatatgtgatcatcttggttttgttaggaatttcagttatgggttcacagagaattgtataaagttgaaacttgaaaccatgtttcctctttgaatccctaaaactacaaataagtgtatatggatatggttcagaacatatccatattgagagaatcattcacttttgatgtcaccaagcaatttcttgtccattgaaactgatctccttcttagtcaattctgacaccaatcatatgtatgtttgatgtaatcacttcataaattatatcaatgatgttatcattagcttgaaactgaaggaaggtgcttgatgatgcagatttgctcatacttaatgatatttatgtcacataagtcaaaatgggtccataatttatgcaatgtgtcatgcaccattatgtttcattctatagatggtcgaacaaaatcatcacaatgcgtccatcaaattgagaaacatttattcgggatgtagtaactaagattataatttaatcaacggttaaagattcttgctgtactgatcaaaacagccatatatgtggaatccggtggatttatgtgaaagagtcggagagagttatcttcggcaatgagggtcaagaacaaagacgatgcggatccaaaaaatatagttgacttgactaatgttaatgtatgcaaagagtaaaagagatgaaaaagaaagacagatagtctaagacctaagtccgaatgagacatataatttacggaaaaccccgacaataataagattataaacgaacaaacaaacatgtacagattatacatgtcttattcttacatagattttaattttgcaatagtcaaatactccgtattttcttatgattttctctctaaccacttaaataatttcaagacaagaagtatgaagacctgcctcctttttccaaaatagcttaaggtaaccaataatgcagaaatatactttttttttgttcaaaaaaataatgcagaaatatactaccacttgattcaaatgaataattgaatgtaattgatatatcagaaaaatgaagaaatacaaaaacaatgatgaatccaaatacgaaattacagaagaaacaaacacataaaaataaaaacgagaatgtatagtctttttacccaagccgagatatactactaagcatgaaataaactaatagtcacaaaatacttgacacttgatcacttgcatagatttgctttccttatttatataattaatctatgttgaaaaacaagtttcctttgttctgagaagcaagaggaaggcacgtgaggtgtatcacacggtacggcataagtcaactgcgattctattagagccgttgacctcaaggcatattatgatctccttaccgtcaacagactcggtttttgtttgtttgtgtctggccaaactaagactcgattaagaggatgtacttagacagaagtacgacgactgttgaccagttttaactaaaacacattttcagtttcctcgatgatgttaacgtttatctatatatccttatagagaaattgatattgatggttcattttagaatttcatagctgctaattaaaatttgggatagtggagcaggaaaaatgaaaagaaactcatacttttatttaattgaacaaccaaactttgatattgaaggatttgaagcaaaaaacaggacttctacttacaaacatataactgatttgcatgcatgaagggatcacactcattaacatgtttgaagtttattacagtaacgtatttataaataaagaaaagacattaaaatgggaaactttctcttttgacatatgtatccgtttcaattctcccgtcaacgatcttgtgtcttttattatatcaccaaacgattctttgttttcttgtgtatcgtcgtcgactcctgcaaaaatatatgagatatgttaacataagaaataataggttactagatttgattgaagtgtagcattgtaaagtatgagaaataataattaccattagagacgattaagtaatctagtagtgaggaggaggtggtgatttgtaaaggtagggttggtgtggaggtgagtagtggtgtactggaggaggaggagaatggtataccgtagggggagagtaatggaccggaggaggaggagatttgtattcgtagtgcttcttgggtggtggtggggagtggtatacaactggaggaggtgagtagtgaaccggtggtggtggagagtggtatacgactggaggaggtgagtagtgaaccggtggtggtggagagtggtatacgactggaggaggagagtagtgaaccggtggtggtggggagtgatatactacgggaggaggagagtagtgaaccggtggtggtggggaatggtatactacgggaggaggagagtagtgaaccggtggtggtggagacttgtaaactggaggaggggagtagtacttaactggtggtggaggagacttgtaaaccggaggaggcgagtagtgcttaaccggtggtggcggggacttgtaaaccggaggaggggagtagtatttaactggtggtggtggggacttgtaaaccggaggaggcgagtagtgcttaaccggtggtggtggggacttgtaaaccggaggaggggagtagtatttaactggtggtggtggggacttgtaaaccggaggaggggagtaatgcttaaccggtggtgggggagacttgtaaaccggaggaggggagtagtgcttaaccggtggtgggggagacttgtaaaccggaggaggggagtagtgcttaaccggtggtgggggagacttgtaaaccggaggaggggagtagtgcttaaccggtggtgggggagacttgtaaaccggtggtgggggagacttgtaaaccggaggaggggagtagtacttaaccggtggtgggggagacttgtaaaccggaggaggcgagtagtgcttaaccggtggtggtggggacttgtaaacgggaggaggcgagtagtgcttaaccggtggtggtggggacttgtaaacaggaggaggagagtaatgcttaaccggtggtggaggggaagagtagaagtaatttgcggtggtttgagagacaaaagcaagggagaatgctaagacaaggaaagaggccattggtgcccccattgtgttatgtgttttgctttgtgtttgatgctcttactctctcccgttagcatcctttatatagcttctcacatttacattttatccctttttacgactatctctcatggtagtaaatttgtgtcctgttgtgtgtaagcaatacaaaaaaagacattgactatattaataatacaaagaaagaaaatgaggttagtctccctcgctcgggtttcattattgattctcttcttcccttctattattttcggtcgtagttgatcgacatgttctgaatgttccgaacgtataaaatcacatataatatagagaacattgaatctaaagataacaggattataccaaaaaagaagaagaagaaaacaaaaatctaaagctaacagaatttaagtatgaaatatgttaaccaaacaaaactacaagaattgatcgagaggtagatcggcctgaagaaagatcatatgagaggataatacatccatttctgagtatggtaaatgttaacagttacttcatttaacagcacatgaaattctagaaacgaggccatatggtatgatatgatcatatgttaacagttgtgtacacatttttgcaacgtctgcaatccgataataacttatgtctctacaatgtttgcacaatccacaaaataatctcatggatatttagcttcccactaaatttcttaaacctattatgtgtttcaaactttcaatgccaagttgtgctttcatcacccaaaataatgtattgaaagatttagtggcgaatgaaaactaatattccaaattatcttatgatttacatgttcatcgcaaaacgaaatacgaattctaagcaaaaaaataaaaaataaataaagaagtaacgcgttaaggtcttgaagatataggcggcctagttgactatagaaggaacattgaagtagaaagatgtccgtcatgtactagattctctttcgtgccggtgacagtcaattttgattaacttcttacttttgtttttaggtttttaattcatatgttttctattactcttacacgtttcttttgtcattacgcttattaatccctcgcaactcttaaatttatctaattattaattagtctaacattaattcaaacctaaatacattttacgatcaagacaacatattgtaacttgtggtgaattttgttttagctgcttgcttgtgaatgatgtaaacaactcaacgataaaggccataacatattgacaatatttatattgtttttcatataatgttaacagattgggaattatcttatcacgaacaggtgttttagaaatgtataaggaggaggataatccaatttaaggctaagatcgaaaataggtcaataaactataatatcgaaacttggtcaacataagccaatataacatctttgataataaaattaaatgggattttttcttttgatttttatcaaatgggtaagtaaaccagctggattatgatatagacaaatcaacaacttaacattctatatagtattttttctcgagatttgactattttggttaggcgtcaaaagttctataactaatcttgacaattttgatatagaagaaatcgacttcaaacaaaattactataatcaccggcattaataatttagatcaggtaaatttaattaggtttgagttatttagaaacaatactaatgtttgaatacaaaatatttgttcggaaagcatgagaaaaatacgatctgatatcaaatatggttgccttttgaagttcagttaataagtagtgattataacaaacattaaacagaaacataattcaagaatacggttgccttttgaagttttgagttcaaatttgttttattcaaaaacgttactagtgtttttaggaaaattaggcaaatgcgaaacatcgtttggtacttcaaagtccaagccaagtaccaaaaaggataacaaaaggaaaaaaaaagtaaaaaaacaaagaagctatttgattgataaatgataatatgtaatttctaagctccatattcttatttttatttttgtcaacaaagctgctggttgatttattatcttctcttcggagataatatattcatatcaactaactattagctacgtgttgttgatttatttttataaataataataatattatcatatatatacacccaaattcaaatgaatggaaaagaaagaacacacatataatcgaaccatcttaattgttactattccctggtaaacacctatggagtttattttgtcgtattgcacactttgcccagtgtttcaaattttcaataaatgaataaaaatttgtcccaataaatcgccaactattggatttagtgattcaactttattttgatactcttagagtatattatatttatacatatggaattttaaagtaccctcgacaaaaagaaaaataataattattttttttaattactattctcatttatatttttcttttccaagtgatgccttgttttttccttacattcctaattaattttgagactataacataacataagtaatgtgaatgttcataccaaagaataataataatatgaatgtgtcaatgtgctaaagcaataatgaaatatatggtatgttactgacatgttctaagttttactttctgttttatgtgtatatctcagcaaacatcactacttagtacttactattcgctacaacttgtcttaatgatcccccgcgtactgaattacggacacggttctcgtttgttcataaaacgtaaattattagaaactaatcatttttcatataaacaaaattatactatttagaaaaagaaaaaagaaaaacaattatactatttacctaaaaatgatggtcaacaatttgtgtattgatttcttctcctccacactcatttttatattaacaaaatacgagcttgtattttcataatgatctaccaaataaatcaatgactttaaagcaaaattccatgcaaaagttaaagaagtaaagagtcttttttcctccaacatggctgattctgattgatttctcataaaaaattgggttagaaacttagaatcgttaaagctggtgatggaaaggctccctccattaccggaaaattcacctgaacaattttttattaatggttgttttgtagtattcttgatgttcatttttgatcggtttacgctgaaacaattacatctgaacgtatatttactgcaccaagtttttttgttctactacctatcacattgtatatattattttgcattttgttactgaagcatgttatatttgatcttcgatatgtataaattgtaaaacataattatttctaatattcatttctcattgtaatgtgtgaaactctgaaatattttttctcgtgtgaaagcattggaaggggttggtggacttcgtttcttcgtggggggccgccagagcccagaggtctgctaatttagcagccactgctaataagtctttctgtatagttttgttattcatccttttattagttttgtctcctctcgagaaaaattcgtccctcttatttttctttttcatttctcaaaatggatgattggagtattactccaaatgtctatagaatcggatcagagtttcctagtagctagtaattctgcatcgtacaaacaaatagttttacctttttgttgtagttgttaggcaacagtttctttcagtcatgacttatgagacatgactcatgagagaggttatgattaaaattcccccaaattaggtaataaaacacaaagacggattcatattcgagacttttaagttaataatttactatcacataagtcttaaatttagaggtttcttttattttgtctcaaatttataggtcagttgagaaaagactaggcgattaattgtgaaatgcactacatgtacaaatcttagtaggttttgactactgactattagatcaaagacctaacgaagattatcttggtttacggaaatgaacatttttgataataataataaaaaaaagaactttgtcttttaactttgcttactttcttaatttttcacaaaacaagttttttttcttcataaaaatgcatgcatctctttttcttctttaatggaaatagataatacagtaatcccctaaagttagtctttcgtcatgcgaaataacaaacacatgaagaatgattgattaatcaccgactatgaaaagtatacatatatatagcaaatataatctaaaaagacattacctcaatctcattaattaaccttttctcaacaacaaaaaattgccaatatttttaaaaaatcatgaaggtggataaaaaacgttatttggtttaaaatcgtttttggaaaaggttgaaaaggaaactaaaacacattcaagtacggttatattttgataagcgacatccaaatagccatacattgtagtgaacaggtttaaataagtattaacagacacaaatataaagtatgatcagaatccgaagaaacttaagttgtttaatttctatatatttaactttccagcttcggtatcatatcaagtgtgaattagaactctatgattgaggagacgactcaacgaactagtggctaaaacaatactttaaaatactgtcaacgatattttagatatatagaaagtaggcgtattttgtttattaacctcagcagtaaatgtggataaacatcgtgaaggctatggacctatggcctttaactccttatgagcacgttgtagcatttcgtaggaaacacgtaaacaaaaacaaactatgtctctaaaatcacaaactattgctcctaaagtctaaaaggaaaaaaatatatatatattaagaagttaaaaaccatgaaaagggacagacaacaaacatggaagatgtttgatatgtaatacgaacgtgaaacgaagaaaagcatctgccttcggatatttgtgtgctgttgttactcttctgcaaagagattagtacctttttcgaataactttaacttacatatattgaaaactcaaattcttattattattggctaaaattaggactggtaaatagtaaatcatgcacactgccatcaaaatcctaccggttgatatgaggttttaagtcgaaattaggagattaatccacagccccgaaagcaatcacgtctcttttcttgtccatgtgtactacataaagtttacacagtcagacaataaatgtaacaagataacattacataattcggaccacaaagaaatctattaaacttatctcagacattatcaagtcttcccaaactatgccaaaaaaaaaaagtcttccccgtcgacaccatcttcaaacacgtcttcaaataatacagataaacaaatatctttgaaagacaacaaacatttttccaaaattgaagagaagacaaaaaggagaggaatacaagtcaataatatgaactgagaaagatatacactactagccatagataaatcctctttcataatgtatcaagaatgtttcgatatctaaaaccaatcattttgtaatgaacatttgaaatcaacaacacaacttgataacatgacatatgagcttgaaatctaggaagggaacaaaaacagtatatatatgttaaaagagtctttttcagtttctataacctcatattctacactctccgcgcatctttgtttctctcgactcaggttgcttcaaggacataagtgatgtaatgtgcgatttcattgagattatacttggaaagggaggatgtatatttccttcaaaggagataccacaagtcaccatttggttgacgtaccacaatgtccctgagtcatcaccttcttcctctttgtcctggtcttgaacctggtttcctagaaaactggagccgcaggaacttggaatcagactcgttttcgtccattcgatagcctgtcaaaggttttagtttttaaagaacattagatgcagagcataggtgtctagatgatggatggagtttatggtttagagattagggcaatggttttatggctttgcgacttcaagttcacgctacagcacatatagtgtgtaaggttgcacttttccaaaaccaaactcaatgtataccagtatgtattagtcgaaagacaatccaacagaaaaaaatagatccaaactatgtaaacaagcttagaatgcacgtgaatcaaaagccaggaaaaatataaacaaagtggcaagatatttggagatgcttatcatttaccttgtaaggcgctcagagcagtcgcagcacaggcagggtttgtaaaatcaacaaagcaaagaacaataggatctccgttccgctgcattgccccataaatatgaacccattagcaggtttatcaaagtaattactttctataacaagcgattttcagtaatatccaaactttgaagcagggaaaatcttacatgtttggagtctttggtcacaagtctcacttctctgtatcctacaaaaggtcgaaatatatctagacatcggttaaggaaagtggagagaaatagtttccgtaaaagaaaaaaacttgtaatgtgtcataaaataggatacgagctacttccctcctagagcaattagaaggaagtccttcaacatataaagtgttggatgcatctgaaggtaggttacgcctaccaacaggttctgggggatcaaaaccaatggtgtgaccatttggaccatggtctaaagggagaactccaccacgtctcaacataaaatcatctatggtttgaacgttacctcctcctcctcctcctcctcctcctgatcttcccatggaaacagaaccaccttctcctgattgcttcaacaaaaaaaaaaaaacttttcaggtcaataaaaaaagaagaatgaactgaaaaacttgcaagaaagaatggtaccacgctctggagatagcgatcgtaagctgaaccgatagttctagtatcgggaacatcgagatcctcatctcgcggataataaccaccaccgtgccctatagtcattgttgatgatggagcttctacaagacgacaagcattgtttatttcaagcaaactaggagcataactatctatgtgttgaggaaacgtgaaaggactcaggagcttaccgaaatcggaacggggacgtttcataggaccaccaggaggatgatgttgctgtcgctgctggttccagtacccatccgccatggaaatcgaaggatcagaagctactagaagggaaaaattaagggaccaaaaaaaaaaccctaatttcgatgaataggttcgattgtagctggatttgatagatggaaaccctagctttgctcgttcttctgctccgaagcactctcgaaatcaaaagttttctcaaatctattgattccaatttcttgcttctcgatttcgaagtttctgattattttgtcttaaagatccgaaatctcgatgacccggcccgttttatggcaacagatctcaatttccgcgttggattaacgggctgctaaatcactattttaaggcccatttaactaaagttggatttacgtggatctaaaaaagtctaaagataagtgaatgtgtgaatcacggattatatgtgagtaacgagaaaatcataatgaatgaaaaactttgaataagtgaattaatagctgacaaaaataaaaacaaggtaaatatataaacgacaaaacaaaagcagaattatgtttttataactggttaagtggttagtataaatgtaggaaatgaggagatggacccaaacacaagaacaataaacaacaaaagtaagtaggtttccatgtttccttggagcttttctttttgttaaccaaaacttcatttgttctcaactcttaactcttaatcctttgccttaatcatcattcattttgtttctctaaagtctaatcatacaatctatcaccatcgcatcctcttagtatttccttaaattttatcaaatatttccgcttcagaactttcctattaaatcttatactgtcttgataataaaactttatagatactttcataaatatacatgtaatatggttttaacacacatatatatacataactatttatatgatctgtattagtttcttgaaacgatattgtcaagtgttattcatgagattttacgtttcagtaaaaatattgttcgtcttattcattaacatgttattcttaagtttacttacatagagataatataatactcatgtacatttgatttagacttagaactcaacatttcgaatatagtataatatcatctatgattctatatatgtatggaaaattgaactacaactttagtgtcttgatagttgggcatgcatcatccaatccaaggtttcgatttgcttttacaatgtcgagaagagctagatcctatgtaattatgtattggctaccaaacaaatcacattcatattcgctaaataaccagttaaccactaactattttgttttgtcggtgaatgtcaaggattacgcaaataaagaatcatataagaagaataagattaagggagacgcactattatagttttcaccaaaagtggatacattctcctcgactaactccccgaaaatgtggagagaagcacccagaccaaatgggcccacttacctctccttagggatacttttgtctttttcatagcaaacggcaaccaacattcaacgtagctgcgccaaaagaataaaccttccctactagtaaattaccattgcgtgacctcgtgttagcccggacaacctgaaccggccagctcagattctaatttatatgttagggagatttggaaattgattacaagtgaaattgtaatggcaaggaatctatacaatgatattaaaagtaatcaaaccaagaaagttataaagtcaatattattcatatctaaacaaatacctaatatcaaaaaacaaatgctgcacatagctaattgaataagaaatcaatattgatcataattaaacaattaccaatttggtcaacaaacaaatgatgcacttagttatctaatttttttatttgtgtttaatcataagtttttagataaagtggttcaaaccatatactgatatacgcacgtaaagatttgtatgttgattagccaataagcttacttttatataaagtataaattaaccaaacaaacaacttcttcacaatagagaattggaaatctaactatgcaatattgatcacaatgaaagtacgtacgacgaactaaaattagttctaaaacatagaatatgatgtaatccactcccataccatatagtagttttttaaaaagaatacaacaaaaacaatttaagttcgaatgtacaaacaactgcatggggaacgcctcttcactttttttttttatttttcttttttcctaagcatcaatagagttatagggatgcctcaatttttttattttaaagtataaattgttgttaaaaacaaggaaatagaataaagtataaagtatatatttattaataactccaagaaattaaagtgtttcctttatatttatatagatgtaattaatttgtggtaaaacaattttaccgtcgagtgtctgtgactccgtcttcttcttcttcttctccctctcacatcgtcgtcactttctttttggctattcttctctctgtcatcgctgtctctgacttcattgtcttcctccttcttcctttttgcttttccgtcgtttttctccgccggatttttctctctccaccaccactacctacctcctcctttgtctcgctggaaattgtttccgagctcaaaattaagttcctgaagatcgggttctagtccttttccatctcggagaagcgtctttagatctgggcaagcactgccatcttcaaattttttaccttttttctccttctctatctctcttcaccaactggggtttggttacgggttaaattgatggtttccgaggcggctagaacctcgtgggctcttgtttgtagatgatgaacggtccttcgtgtaaggatcgaagagggtggttctcttctgctctgtttttcacatggaatggcagatcttgtgacctatagtaatgccgaccacaaccttgaacaggttcttctgctcactacctttcatcatttcgattttgctcagtttgggaaagagtttatttgttctaagcagtagaaagctcaaatctttgattgaaaaatgtaatctaaggagtttatggattgaaacccaagtttaaatatttgagattttgtttgttcaaattccagcaaatctctaagtctttctcaaattcttctttgtaataccaaagagtcaattagctggatttaaaatcaccattgagactcattacttggtgatgtaaacgaatatgcagttctctcttttttttcgtcacacggttcttgttaaagtaatcttctacatttggcaggcattgattacattgaagaagggtactcaacttttgaaatatggtcgcaaagggaagcccaagttttatcctttcagactgtctagtgtgagttgctttctgctccaaccacttgttttttgcttgtttgttggattattgcttcatctgataaacctgtgttgtgttgtgcaggatgaaaaatctttgatctggatatcaagtagtggtgaaaagcgactgaagttagcatctgtatctaaaattgtacctgggcagagaactgtaagatatcttcattttatctacagtctttataatgaatattccatatagtatggcgaattctgcttcctttcaagcttgtatataattaactgtttcattttttgcatctcaggctgttttccagcgttatcttcgcccagagaaagattacttatccttttctctcttatacaacggaaaaaagaagtctcttgacttggttagtcatcgtgaaactgatatatttggacaataatttcaacaacacttgacaataactccaggcataacagttcacttcttaatagatttgtaaggacaaggttgaggctgagatttggattggaggcctgaaaacattaatatccactgggcaaggcgggcgctcaaaaatcgatggctggagtggcggaggcctttcagttgatgtaagtactctggaaaggactcctttttgccaaatatatgttggtttatcaaatgggatactgacgacgtcgtggtctgttgaactcatcggttgatcctgttgatattccattttggtgtttaatgcgtttgtttgttttctatatatttcaggccagcagagaattgacatcaagcagtccaagtagcagttctgccagtgcttcacggggtcacagctctcctgggactccctttaacatcgatccaattacttctcctaagagtgctgagcctgaggttcctccaactgattcagagaaatcacatgttgctttggacaacaaaaatatgcaaacaaaggtatctggttcagatggttttcgagttagtgtctctagtgcccaaagtagttctagtcatggttctgcagcagatgactcagatgctctaggtgatgtttacatctggggtgaggttatatgtgacaatgttgttaaggttgggattgataagaatgcaagttatctgactacaagaacggatgtccttgtgccaaagccattggagtcgaatattgtcttggatgttcatcaaattgcatgtggtgtcaggcatgctgcatttgtgacaaggcaaggtgaaatttttacttggggtgaagaatctggaggaagactgggtcatggtattgggaaagatgtttttcatccccgtcttgttgaatctctcacagctacttcatctgttgactttgttgcttgtggagaattccacacttgtgctgttacactggctggagagctctatacctggggtgacggcacacataatgttgggcttcttgggcatggctctgatatcagtcactggataccaaagagaattgccggttctctcgaggggcttcatgtggcttcagtaagttgtggaccctggcacaccgctttgataacatcatatgggaggctttttacatttggagatggaacatttggtgtcttagggcacggggacaaggaaacagttcagtatccaagagaagttgaatctctatcaggattgagaacgattgcggtttcatgtggggtttggcacactgctgctgttgttgagatcattgtcacacagtcaaactcaagttctgtatcatctggaaaattgttcacatggggcgatggagacaaaaaccgtctcggacatggtgacaaggatcctcggcttaaaccaacgtgtgtgcctgcattaattgattacaactttcacaaaattgcatgtggacacagtttgacagttggtttgaccacgtctggacaagtgttcacaatggggagtacagtttatggtcaacttgggaatttacagactgacggaaaattaccgtgtttggtggaagacaagcttgcaagtgaatttgtcgaggagatctcctgcggggcatatcacgtggcagccttaacatctagaaatgaagtttacacatggggtaaaggagccaatgggagattagggcatggtgatctggaggatcgaaaagtacctactattgtggaagctttgaaggatagacacgtaaaatacattgcttgcggatcgaattacactgcagccatatgtcttcacaaatgggtgtctggtgctgagcagtctcagtgttcaacctgtagactggcttttgggtttacacggaaaagacataactgttacaattgtggacttgtgcactgtcattcatgcagttcaaaaaaagcattccgagctgcactagccccaagcgcgggaagactatatcgtgtctgcgattcttgttatgttaagctcagcaaagtgtctgagataaacgatactaacagaaggaacagtgctgtgcctcgtctttcaggggagaatagagacagattagataaatctgaaataagattagctaaatttggtacatccaatatggacctaattaagcaattggatagcaaagcggccaaacaaggaaagaaaactgacactttttcactcggtcgcaactctcagctgccttctttgttgcagctgaaagatgctgtgcagtctaatataggcgatatgcgaagagctactccaaagttagctcaggctccatcaggcattagctctcggtcagtgtcacctttctctaggagatctagtcctcctcgctctgccactcctatgccttcaacttctgggctctatttcccggtgggtatagcagataatatgaaaaaaaccaatgaaattctgaaccaggagatcgttaagttacgaacacaggtatacattctcggagaagggactcatgcttcttagttcgttcgtccatctacattaatgtgtagtctaattaaaatcatggatttggtttaggttgacagtctaactcaaaaatgtgaattccaagaagtagagcttcagaactctgtaaagaagactcaggaagccttagcattagcagaggaggaatctgccaaatcaagagccgcgaaagaggcaatcaagtcgctcatagcgcaggtataatcgggtttgaactacactgaagcttgaatgaaaactggattttactcccacaagctaacttaactggtaaattttgatattttgcttctgtaacagctcaaagatgtcgctgagaagttacctccaggtgagagtgtaaaactcgcgtgccttcaaaacggattagaccagaatggtttccatttccctgaagaaaatggtttccatccttcaaggtcggaatcgatgacttcatctatatcttcagttgcaccttttgactttgcctttgcaaatgcatcttggtctaatctccaatcaccaaagcaaacgcctagagccagcgaaagaaacagcaatgcttatccagcggacccacggcttagcagcagcgggtcagtaatcagtgagagaatcgagcctttccagttccagaacaacagcgacaatggttcgagtcaaacaggagttaacaatactaatcaggtagaagcagagtggatcgaacagtacgagccaggcgtgtatataacccttgttgccctccacgatggaactagagatttacgaagagtccgcttcaggttaaacattttgctcatagagattccatatttttttactataaggtttgatgatgctaaaggtcgtcattgtttctttcttgcagccgaagaagattcggggaacatcaagctgagacatggtggtcggagaatcgggaaaaagtgtacgaaaaatataatgtaagagtatcggaaaaatcaacggcttctcaaacgcatagagacagagatgaagaagaagaagacattcctcactagtagtcagtctcctaataacatttgtatgattttgccccataatttcctgtgtctctctgttttgccccaaaactgttcattgttctacttaagtcctttttttttttctctatctcgattcaatctgtgggagattaattttcatgtcctctacatgtatgttgtatatatatatgaagaccatcggttctaagattactttaggaagaaaaagaaaaacttaagtattgaatttgcctaatgaaggtcttgtttttgtcttttcaaattgaaataattttgatttttgttattaattgactaatgacaatcattagttgtacctaattctgtgaccaaaatgtgttagtataagttaaccccacaactaattaagtaactaaaatccatcaacttccaatgcgcatattcatattttcggcattttaattaggctttacatttttaagattctcattatttatatactttttgctttaccatattagacattacaattattcacctgtaaaatttaatacatgatattatctaccaacttgttgttgactcttgtaaggcaataactaaaaagtgtatactaaaagagtcaaattttactctttatcatttacaaaaaatgacagtgattgcaaaatcataaataagtttttttccctttcatttatttaagctaatagcatgattttctcacgtattataatgacatgttatttcgtcagatgacatgaaatttcatatgaaattgatgtctctactcatttacgattttgatttcccattgtatcatagcacatagttttagaaatttaattttcttcttaaacctatcatttgatatttaagttttggaaaatcaaccaattacaaaagatacggcataatatatatagtctcgaaatagcatctacatttaaaattttggattgaaacttgtaaaacatcttatataataaaacaaaataaaattctaaaacatattatataatgaatcaaagggagtaattgactggttgatttacaccttcttcttttctttggttacaaatgtatagatcctaattatggttggttggttgttgctaataaatgcgttatttgctcgcactagaaaatttcaaagtcatcgttgaatattcaaacggaaacaagtttacattaacaccattaatcatcaccttaggtccagactcgatcacgtctgatccagactcagcaggagtaacactattaaacaggtatgaaattacgcccaaaaccgcagatttgaatgaatgcctcaagaaagtagcaaacataccaccgtttttgataaagactttctcctgggaagagatctagagatgttgtggtgggtaaaaaagcgcagcccgacctgaatccaaaataaatccgcccatcaaaaactcaactttaaaaaactcagatggatttttgatttattgggtaaaacccgaaaaaatctgattgttctgagactacccgtgggtacccaacttgatttttattattttcttagaatttatgtttaattgttaatatactattatatgtatgttgtatctatattttgcttataaatatattttaaattatatttattttctgtattacatatatatttgatgggaaaaatgttaaattgcgtttttggcgggaaaatgttaaattgcgttttttgacggaaaaatgttaaattgcgttttttgcggtaaaaatgtcaaatccttttcttggccggaaatgttgaatgtcgtttttggcgggaaaatgttaaattgcgtttttggcggaaaaatgttgaatatcatttttggcgggaaaatgttaaattgtgtttttgaccaaaaaatgtgaaatctttttggcggaaaaatgttgaatgtcgtttttggcgggaaaatgttaaattgcgtttttggcgggaaaatgtgaaattatttttggcggaaaatgttgaatgtcgtttttggcgcgaaaatgttgaattgcgttttggtgggaaaatattgattgtcgtttttggcgggaaaatgttgaatgtcttttttggcgggaaaatgttaaaaaaatattttggtggtaaactgttaaatcgcggtttaggaaaaaaaaatgtgaaatctttttttgataagaaaatgttgattcacttgaaaaaagattttaaaaaaacacgtgggtacgcataacccaatgaggtaaacctatatgggttttatttatttgggtatccagccgattttaaatctgtgttttttttccagaaaaaatagatctatgaacttaaaattttatgtgggttttgggtacccagtaggttttaacccatcattaacatctctaaagagatccaatccctttgaagtttgagctatcaaaaactttctctgttcttcaaaacttttataggaatattctataacagacgaaaacataagtatatactactcaataagttacatcatatgtcacgaatatattagctaacctcactttcagaaattaaggcatcatttatggtgtgacttcatttaatttgacttcatttatgaaagttttagtgtctgcagcagatcacatgtaaatactcccaagaaaaattctagttgaccgttatgatgatgtattttctcaatttcatataattcttattttaacatttaaaacagaaatccataaacatattcaattccattacacttttaaaaaccaactgagtcttggtatttacctatatggtactggaacatatttttagtatttttcttttgcacaatactggcaaatcttttgttaatttgttgaaacattaattcgggtacatattcgttttgataaatggtacgcatttgttggtgattaatttaataacgcgagtaagatatcctgcccctaaccaaacattagtaaaggcttctagatttaataaaaagataaaacatagtagatgttttgtgatagaataaagagggtacattaacatattgatgcattacaattattcagtcatgagttcacatattcgatacatattctgcaaactgtaatacaagtagggttaagataagtgggcgtgcgtccaaaaatagctcgaccttgagttggttcctagatggaattagtggctgcaataattaattcctacccacaaagaaactttctttaagaaaagaaaaacacaaagggatagcaagaagataaacatgactagatctctgttataatgcatatatagattatagatatatatatgtatatatatatatatatatatgtatatgtgtatatgtttaagtatcttgtagatgaagatcatggacatctatgggagttagtactctgtaaaccgtagacgttgtgtttcctggaaggagcagaatgtggaattggcaatgtcttgggcaaaaatcctgagaaactttctggaggataatcatcaccattgaaaccttgattctgatgatgatgattacgggggttaggtcttctcaccttgaaaaatctttgtggtcttgacgatgatgagtatcttcttaagctatcggcttcacaaatcctccatgagaacaccatcatgatcattaccactagaatcatcattgcttttatgcgtttattgcccattattgttaagtatactatatataaagcttgctttcagaaaacaggtgagagggaagatgaagaaatagagaaactaagtgttcttcttttaaggtgagtattggggggactggttgatattataagtaaaataattgtactaactattatataagagtatatatatatatattgatatgaagttgggtatacaggggtcttgattatgatatttcttaccaaaataacctctaaccttataatcctgttcttttgtgtacatatataaaaggaattattttgacatttttagataaattgagtatgttttagttaaagtcaatcttttgattcttagttatgatatattttctgttttgttgtttattgaaaactagaaaagcttgggtttctacaaaaacatactccatcataaactattcagcaaaatagtagtattcctttaataggaaaaaaacagactaactaacttgtatgaaatcgagacttggtgggatttttattattatgctctattatgttataggtctacatattaagcataagcataaatgggcgactttaatgttttctagtataaactattactatttaattaatataaatacaaattcggtgtactttagaaagagggattgcttgattaaaggcatgaaagattgtgttgtctagaggtgggagtgggtaagatgttttgtacttttgaacgggtctttaggggatcaggggattcatatctgtaaaatatgatggtcttctggttttgtaattgctagtggaagcaattaacaatataattaactttgaaaactaaggattttattgtttgttttatagtagttaatgacaatcgactagtaaacatatattgttaaaccatcaaccacaaaacaaaacatgatttacacacggagatttattctcattattgaaccaacaactacaaaacaaatacataatttggttgttacttgttagtcgaagcaaaacgaacaaagtctctatttatatgtctatacaattttttgtatctatttggcatatatatgaatttaacatctagattttcttgcaaccatatgataaacaaccaaatttcattagagtgaatgtgaatgataaagtaaaatcctttttcgggtaaagaaaattcaattgacattaaatgcattgtgaggaacatggaaaaaaagaaaaaaaaaaaagtggaggaaaacaaataaagaaaagaacgatgactgaaataataaatactataataggaaagatacgtagggtggacaccacactaagtttgaaattttttgacttacaaaatgaaaatactacgtgagccctacccgaaatttgaacaatttttagtgtactgaattgaataagttcatttgaaatttagtaaattaagagttatccttctatgttaactcatttatacgaattttagatagcttaactaaatttgatatagtattcaccaataaaatcaattatcttaactctcttttataatagtccagttactccaactcagtaaatttgataaataatattcatcaataaaaagtcaaatcagacattttttcaactatctgacatctcttcgtctcacatatagtataataaataactaattttacccattaaagatagaaatcaattatgcaaacaatgtatacactgagtcgatcgatagttcttttaattctttcggctaacgcaaaaagtcggctaataaataagcgaccaagagatacgctcagtttcaccgacaaaaacccttacacacatatctacttgccttaccttaccgaaatagagtatttatttcatgtcgatgttcacatttatacaactgataaaaaagcaaatgggataaaatattgaatacaatccaaatcgaaataaagttgcaagcattataatcaagctcactaaacaaaaaggagaaatgcgaaagaaagaaaaaaataaagatcaaagtggaccttggtttgccgacagagctgatgacatatgcaataagaaaagacatgtcatggagtattgaatattgttggatagattcaggtagtcctacttttatttattgggtcacgcatttaatatcatttttttgtttttggtataaacgcatttaatatcatatggttgctaaagtaggccctttggaaatttccaaatccataggaaaaacatttaattacgaaatgcccgacagttttttcttctttccttgcttttttctttctcatataaaaccttcaacgtatatagacatatgtgaggtaatgctaaccgagatcaaagctttgcctcactgcctttcaccgtgctagtttgcaaaacacatttcattttatataacaagatatataggcacattgttcgaagcctcgataagtcttgttttgttctctctctaatcgagccgttaactggaccaaagtgtgaggtttgctgacccacgcacttggaatagacaagcacgtgttatatctcggtcttctctgttttgcccgtattgggcctggttcccctttatgggctttgggctatttatttaaatttcttgatttttttttagtattcatctattgtttgggtctgaccttcagttgttcctggtgtcttccaccgattatggctatgttcgtttactagtcagcagtaactagcgacttgttctgttattcgttttacagtcgctacgttatttgtttagttaagagataacccgtatatatataccaatgcaaaacttttagatactaaaaagtgaaaagtataaattaatggagggcaaaaacaaatttaacagagtattattacttaaacagagactgtaatattaagctctctaatcatcatccgacgccttagttgcattttagggtgcattattaagctctttaatcaacgatccgtgcagtaacacatgcgtatccgtggttggactctatcaggcctacaatagcctcctggatgaccaaactccttacattcaaagtcgcaatctttttcatcgaagctgggatcacaaacgtgaaatttatagtcggccaatcctgtatgaggaggaaatatagtttttctttttggttaagagataaataaagcattatcaaataagtaaagaaaagggaacaagattgaacatatgtgtaatctgatgtcgataagtatttcttttgattcaaaaatttaaactaacgaaataagcttttcaatgtgcattcgaacgacaatagtcatgtaagtgctagtatttcaagatgcctttttacttccttaaatcttttctgtttaaagaggtactgtaaatttcacatgatgttgatagatcaagaaatcaatctatttatattttaacttacaagaatatattaatctaataaaaagtatgtctgatctttaacaacatgataaaaaaaataatgaattagaatcacttttgtatacagttttgaatcgacaaattataataagttaataacactagcatgaaaggagtaccagaatataacctgaggttaagagaacactaacgcaaataaacacgaggaagaagtgcttaatagaagccatctccgtggaccttaatctttgaatactttttgggaaaagtaaatttatatgaatatgactaaatatgatttctgctctcacatacacacacgtatatatatatatatacacatatatattgacatatgttaagtgtcgacaaaaaaaaaaaaagtaacaaatcaacttgaatttttttattaggaagtaaaacatacttatacttcctaataaaaaaatccagttgatttgttaccttaacccaaaatatctattaatcaatatgtaaacttaccttataattaaaattttataaagtttattgccttttatgctacctccgccactgtatatagcggtgacccaattacaaagactgtaagtttgtaacatcgctcaaataaacctattgaacataagagaggcagccacatgacgggcctcgacattaatgggctttcgtggataagttttcttctaacatcataacggtgacaatcgcaaaaacaggaaaacaagaaaaaagaacacataaatatcactttacattatacaaactgcaacataatctgtatataacacggatctcataaaattttcattttccagcaagatgatgaactgtatatgaagagtagcccaaaaatcaccttaattaattaatttgataatagtttctttcattgtaaacaaattgagactctccgggaggaccgcggcaataaggtggcttgagacattccttaggaacaggagcgtaaataggtggagcgtacgaattagacggcgtatctgcaacacagttccaccttatctattatatattgatacaaataataatatatacagagctgtaattaatatttcataactgttatctgtatatacgatcatgtgacatgttatgaacggaaacataccagtaaaaacaactcgagcatgggagattatgaaaagagccaagaatgagaaaagcatcatcacaaggagcttcgatgaactacttggcgttttagccattaaacaaatatctctctctttcttatttttatctatttatttgattaatgtactctacttattaagaacacatttgggaaatttacaataatatcctccgtccttcccaatccctcgggagataatagaccttgtggtggatctttgtctatttacaatcacatacttatgtgagaaattttgtagatcatctaactgatccttacatgagatatagatatatttttagtgtaactattttgtagatatagattaaatttcttgtgaaattaattttgtatttttaagggttatttttcttgtgtggtggcttttcattttagacgatttatttggaactacatgcattttcaaaactgtagtgactaatcgacatggacatatcaatgctgctatcgaacctctctatacgacataaatatgtgcatggagcatcacacaaaaatgtcttgtcactccctactagtagttatcaaaccctctctctgcgtagatttttctttatgcttttgttttcgtccgcataactttcatgatcggtattgactgactattctgttcatgaaatttacattattgaacatagagttggccattaatggagctcgatcattgtacactcgaaaaaccataaagcgttgattctcgtaatatataattcaaggcacgagtttaaatatgaaatttccgatggtgattacaaatcgttctttggtttgtttttaatagttgggaaataaatggtaagttttagtttttataacatgggtatttaatttttgaaatttaagtttgattggtgaccatttgccattgttgaatttagatctcagaattcatagtttcattccatctcgatatggttctggtcgctttgatctcttcgaaatccaataattatttatggtgacagcgaaaaaaagggacagagccagcaatatcattatacatattacaaactgaaacatataataacatggatatatttcctaagctttttattctccatcaaatgatgaaaacatataataatatacacacatacatcaccttgatataggtatttgactataattcattcatgtgaccaaattgaaactctcatggacggcaatacggtgggtaacacacagggtaactacgcggatacggaccagggccgccatacggcgtacctgcaacacaggtccaaatcatattaataataatactattgatacaatacgatgagattatataaattatataagaatacgtgagattacatactattaaatggaaacgtacctggaagtgattgagcgtgggagattatgagaagcgccaagaataagaaaatcattattacaaggagctccgatgaacttttcatcttagccgttgagtaaatctctgtctctctcttttttcttacaactttatgttatgtgtatatgggtgattaatatttatagactccgtggtacgtgatatggtcatatgggttagaatcgcaatctgtaaaattacgaaaatacccctcagtccttcccgatcagacttttctacgcaagagaaattacgagacaaaagtttcgttatacatgtcatgtactatataaactgcaacatatattatatatcatgattaattcttataaactttccatgcatatcaatatagataggtaaagttatgttgttacagaaatcagaaagcaccgccaagatcatccagcaatctcttattctctagcaaatagtgaccaaaatatagatatacaaaccttattctatgtaaaaatatatatattaaagctgtatccttgtttattttatgtgtgataatgtgaccaaacaactctcttagactgcaaaaatttggattaacaaggcaccggcggaggagcagaaacgtacggcggtggaagctctggtgtaggattgtacctctgtagaagagcattaaagagtacccatcgggagcatagccaagtctctcaccatgtgctcgcagactgtattctcaagcaaacgacgatcatcgccgaagaacaagtttaactgtctatccgagcactcatatatcatttacaaaatacattaagatatacatttttaaccttacaaaaatgtacaattattccaagatatatttgcttgtatatacatagttattattttctattagttacatacataatctctagatcttagttacggaagacacaattgcgtttaaaatgacaacctcgaagtacaccattagattgtttgtttaggtgagtatcattagacacaaggaatttacagacacatcttctcgcgtacctaaatttgttacaacatgctccgcctcggtgaggttgcccggcgcgtccgtatacatgtacattgatgcaatgtctaactttcggttcgcaaacttgtggcattggcgttggcaccaccttcacaggttcctcgggcttcttaggaaacaccacaattgccgcaccggggtcaccaccacctgaaggcttgcctccttgaaacccacccctataaccggtgccaacattactcccatccctaatgctgccgccgctagggatacccccacccatatagccggtgccaggattcccaccaccaccaaaatagccgcttccaatactaggagagttgccactaccaacaaagccgcctcctccacccctgccggacactttaatcggagccggaaatgatgtcaagagtatgataacggaaatgagcatcaatggaatgatctccatgtctaatgaattagtagagctctggtcaagatgaatttgctttaatttgtagacaaatgatcaatgctttatttgtagggtctttaaaataggaaattgtgatcattggttcctacaaaacatggaaatgtggaatgtgggaatcgattcatataaacaagggaggatggtaatttcctattttatgtggggcagtaaaaatatatgttgttagctattttgggttttaaaagctctgtttctcctagcaaaaggtaaattaataaagtcccgagaatttacccaaaaaataatgatccgtgtggaacttaactaagggggtgttattagtttataatatgcaaaagatatctgatattacgattttgtgtgttaaaagtattttaaagctgtgtccttggagtgaagttagagaagtaaaacatatggttgttggtattatcagatactatctctaaataataaggcacactctaatatcatcatcactctctgaaaacccaaaagaaaaaaaaaacttgaatggtaaaaagccacaaacaaaagactcagagcgacctattattattgttggctttggaggacctggttttggcgaactcaaccaggtctttgaaaagcaaatcctctggtttctcttctttctgcggttcactacttgtcaaagaaaggttccgggtctgtccctcgtaagaggaatctgagccgctactcgagtggtgatgctcaaagaactgttgcctctggttgtgccttgaaggcggaggtggaagattcctaattacctcagaggatttgctttgttgtggacttgcatcatcgaaaacaggagaagaagaggaagaagaagtatgcggaggaggaggaggaggcttctttactccctgtgaggaggagttgccttgaggtttatagacgtccccactaaggatatccaccatacccgaatcactaccatgtactggtctccttgtaggtgttgaagacctttagagattgaatttacaaagttacgatcatgtatatagccttccaaataggaatcatcattattacctgtgagcaagccgagcaaactcatcatctgattcgtcatcttcatcatcatgattgatgtcaacaatctgaactggaggaggagctctagtattccttccatttgaaggaacagagccgacatttgcgatatcatcgtgacgctgaagaacatgctgcaaattatcgtttaatgccaatccctgacacagaagttcctcatctctggagaattaaaaaaacgacgttttagcatcgaacggggatgaaagaaggatgcaagtaatattaacttacgttgtagtgttcacaagagtcattacacgtctttgataagtacgacattgctcaaccaagtctactataacttcttcttttaaactctgtaacaacaaatcaagaagaagcagcagcttccatcacttgaaagaaaaccagcagtttcttctctttatcatgcattagagtaagcaaagtcctacctcgggattcccgggatcatgtgctccaagcatgtccatcaaaacatcaactgatccctcagcgctttgaatctcttccaggctaaaaagaaactcaacaaaactataagactccaccacccatccaatagacaaagagcaccaccatctattctactagaagatagtacctgaggctagaagcatcatctccttgcaacgaagcctgaatagcagcatcttcatctggctgagtctgcggtggagtaaagaacgatagactgctttccgttcgaggcggaaactcaattccagcagactatgtaaaaccattttgtcaaaacgtattaatagatgaataaaaagacctcatcacatcacatgtttaacataccctgagatcgttataggcattgtagtattgtgggtatcgacctccacgtccaccaaaggcttcttgccatgtgtctaacaaagttagtatcttttccctcacattcagttccggctgccaaattatgttaggaaatttacaaggtaagagagatacaatatcaaatatagaaattcgagatattagaggcaggtgaggtgaaattatagcaaaacctttttcttcactattttgaccatgtcattcaatagaccacggtcaatgataagctggtacacgttttcgccacaattcttacttaaagtttccaatgcctgcaccaaaacccgacaatgaggtcaacaaaaccaaaggcattgaatccaagaatggagaaaccagtactcacataaagtgcaagaatctggactttagagtttttacttcctaaccgcttcttgagcaccttcacagcttcttttgcttgactaaaggactcaaacaatctcaaactaatcattcccagccacaaagaaaactgaaaactagcaaagcgatctgagagttttctgattacaaatacctaggatccatgttgataagatcacacaattcaatgttaatagcccaatctggaccaatcagcatatcatttgtagccctttctgcacatgcagccgcatcatttgccatcttaacaactcttatcaatcaactcccacaagtttccaaatttttcctatgaagacaccatactctactttagtccaaagctataacaagcaaaaattcaaagacttttcaaagcttaaatactaagcacacatcattagaaagattgcaacagaacccatgaacaatttaaagcaaggaattaacaaaattcaataagctcacaaggattagtctttccggtgatcgtgattacgcagaaactaaaaaggaaaaaaaacagctactagcaaggaaagaattcgaagagtaagaaaactttggaacaagacttgagattcgaacaaaagagacaaaagcaaggatctttaccttgtcaggagacctaaaacaagagcaagcgaggattttttaaagtctcaagacttaaaaaaaatgaaacaatttgaagggttttcgaaaaactatcaaacacggtaaggatttttcaggtgtcaagtcaagtcgccgtcctagaatcaactgctgacttttctgcttctagagagagagagatgttataaaagttgcaaacttgtgttttgggttttgtttcacttttggctaatgtcaccgtcggtgatattaagacaaagtcaccgtcgcactactaaaataataaatagaaaacggcgtcgctttccctataggtttgtcgtcgttgacttgtgcgctaaaataaaattaagagcgttttctaaacgcaaaagaaaacgcgtttaaacgagaagatgacttcaaagagataatctcacacaagtccacaatgaagaccaaactctatcatcaaactcaccagaaaaggaacagagacacataaaagagattcactcttgttgaagttgaagtgaaggcaacgattacttattaagtagtcggtagtgaatcaagtacataagatttcaaaaaacataaaattttgatatttattgatgaacattggtacactattattaatgttttatgttagcaaacgctgaagtatctatctacaaatcattatcaagaactctatagatacattgcgtagacttacaaaaataaaaactcagagaaccacaagaagaagaagaaagatagaatctttgtggtacattgaagacgatgttcatgtcctctggttttatagactccactaaacgtgtctcgagtatatgaaccggttagtcttcttagccaaagaagtgaataaccattgaagaactttttcatttcaatctcgtggatgtacattccagaggaaagataagcatcccctgttttcatccctgtgttaagaaaccccacaatttaaacatttagaacaccaaaagttgtagcgacggcacaagagattgtgttacaaaattaggaaaaatagacaaagagacttaggcatatagttcaaatccctcaaagaagtctaaaacttgaggtcaaaatctcgtgcaaccaacgcaactaaattgacactttccatgaccattaacttcaaacccaccaacgaaaaaaaacgaccaatttcacaaactctttacacgattcacatgatgaagagagaagactatcacaaaacaattcaacactaaaggaaactatcaagaaaaacaaagctcagaaaaagcaaattctagaactagatgcaaaacacctcaacggattcctaaataaattggccagagtttgtggataccttagactgtttcggcttcgatcactattgcttctactgctactaccaccactgctctttgagctcccactgttgatcctcgagacaacactttgactcctacgagattctgacaatccatccttccaccaatctttatcctctcgtttcatcgacagatcagagatcgaaggtctaggagaagaaatccaagaccttttacttgtcacagaagaatcatcatcatcattatctttcttcttattagtctttttcttagcacccaagctaacaggaaacaccagtttcagaagaaacccactattattaacacctccgtttcgaatcggatccacccatttatcactcttcgtcttcctcacgactttcctcggctttttttctctctgaggcatttcatcgaacaccttctcctcctccgtgttaacctcaacgagatccttcaacgaaagctcgtaacacgactcgggcatcttactaaccatatccataagctcacgctgaccacgagcgatgacttgagccttcgtaacaggtgagagattctggtaattgttgtgaagatgagcaggacttttcggtggactcgttctccacagaggaggcgaacagacgccggaatctgaatgatcatcgaaagttctcggaaaattcaaatggctatcgaatgatttcgacgaaagatcgaaaattgccatgattttactttgaagtttgaaggaaccaaaaaaaaataaaaaaatcgagcttttagaattgagagaagtttttgagtcttcttcttgttcacaactctcccgttaaacacgcctttcgcatcaattatatataatttctacaattttataacatttgtttatttgaagacatgtatatattggaaattctagaactaaataaataaattaattttgagtttagggtatgattgtcatttggttatatatgatgattagcttatatgaatttattaattatcaaggaaagcgtgcgacggagataatctaagccattgattattttatcaatacgatacgtatattaaatgatagtttgattttattttcagcaccatcaattagttttggggactatttactcgtccctacttgtttacatgatggagcttattaaatgctctcgccgtctcgaaactcgtagtggaaataaaaattaaacaagaaaatggattttgctatcttttccaaaatttgtttatcattttatataactggaaatctgaatccttgctagtttgctagattcgattacaatcccgtaatgcgataaaatacgggatttaaattaaggatggctctttttaatactactatttataaacaattttgattcaagtaattttttctacagtttaacattttaacatttattcaaaaattttaaaatataagattctaaacaagtgttaaaaattttaaaatataagattttaaactttttattaaacaagtgttgaaaatttaaattatggataaaccatattaaatttataatatttttttggggtttggatattgtgctatgggtaaaccatattgaaatctatgagataaatgttaaaaatttaaattatgggaatttcctcacaacggtcatacttgtcttttacttcgtaacaatttatcaagacaaacttttgaggtatcttatttttgaaacagagaattgggccgttgaaagcgagagaaggtctttgcaacggtcatatttgtctccgtaccgttttttgtggttgcttatcttggttacttagtaaaaacacaattacaaacaagtgagatacaaaaactgttaaaaacaaactttcattcataaaaaaacactaaccatccatcattcatgatacagaacagaacagagcattccttaatcatccatgttgacatgttgttgctgtcttcgttaaccaccaaaaacatcaagaaataaggaaaaagaaaatatgtctgagaaagcgtaaggaatgataagtagcatcagggactaccaagaagcctgaatctatgtccactgataacaaatttgcacacgtcccttcattctttttgctaaatgtccacgtgtatttgtcttgttgctagcgttcactatcttctcatggttcgttttttccttaaataataagacaacgttaagacattacgcagccacttacgtatgttgtatacgttcgacagatatttattaatatttttttttcttaaaacatctattttgttcatattcgactttattattatcatttttgaattattcagataagattttaataaaactaatcatataagtcattatcatataatgaagaaattacgcaaccctatagttctctttttttattttgtggacgtgatcgataccgtaaagaatgtgaacccggattgcgaagatttgagggatccatataccattggcccgttgggtaatgagtagtgacccaatatgtcaccaaacattttgcagctttcaaggggtttgatgcttttcaacccaatttgttttccttttctgaatataattaacggacattctttgatatcacaataatttcaaactgtacaactctccaaaattcaagaatgaatttcttataatgtgtcaaccaatgatttctttcatatttagagggaaaaaaaaactgatgagagagaactcagagtagcatgtaaaaaaggttatagttgggctgattgttgtttgggtgtgaataattcacgaatagaagaagcaaagcaatatttgaccaaaaaaaaaaagaagaagaagtaaagcaacaagccaagttcgcgtcagaggagtgggaaaattgcctacaaagtttgatgaacataggctcatttatatgaaaattgcctaatttgtcatgttttgttgatcttggatgatgtaatcatttatctgcttgtcgctggaatttatttctacggttgacttatcccacggtgcaatacatgatcaatgcatattgacgaatgaggcagaggatataaggtgtggaagaattcttcatctgtacaacatagtttgatccatttttgaattggtagtatatatatatccatctatcgagctacatacaacgattcttattgttacaagctagaatagtgggtagaacatgtgactgaaaagaaaagaatcaaattgttttagaacacaatgtatccaatgttctgctgagtaatctccaggaataataacatagtattgactattgagacataacatcaagatcattatccttctggttttcttgtccaagaaaaaaatagtagctgttgactttcaaaactcaatgcatcatgtgtcaacaggctctcaactcaacagaaaccaccaatctttatgagtggatcaaagtggtaagcattaagtttttttttttttttttttttttgtcttggtgagaattgtgcaataagggttgtttcaaaaacagtgtttgaagatattcttttgttgttcaacatttaaggtgggagaggttgaggccatcacatgttccactaagcaatgtcctttgtaggaaaagcactttggtgtaactttattttttgttttggtgttgtaataattagaagaaattaaatagaggataatggaattaacaacgaacacaaaatgtggaatacattattactaagccttttgtacgtatatctccattcacatcaatttataaagctagctttttttttttcaagaaatctctaggcctctatcgtcatcaaaaactccctttcaatagtcttttatgagacagttcaaatttaggtatcaaaagaaaacattacggaatttaccagccacccaaatgtgaagagaaccggtctttctcatctctagtcgaaattcagcatttatctaagtgtaacaacaatttcataattatttcttattaggtttttcggtgagtttgaaccgggatatatattttgtaaaaatttatactatatatcttatcaatataagaaaaagaagaagaaggatatgtatctcagaagattagttacatctagctattgatgctttcaaagccataacaaaaaacgaaagccttggacttgttagacttataataaaaaagtttatcattcaaagatccatttctttataatttttataagaatctttgtaggagtagtgaattattgcaattttggctgattatatgagtactgtttgtggttgacaacaaaataagtgaactgtttgtgatgtatatatgtttatataaagacaaaatgatggtgtagtttagcaaaataaagaaattaaaggaccattggctgggataattttggagaaatgaaataaagagagaaagagagtgacgtcgtaggaatgtgggggaggaattaaagagataaaagggaaaagataccgaatcttctcatggttttgcaacttggtcggttccaattatttttcacacccactttaaatcataatattgtagggaaataatttcaagctacatattgtacattccgagttccgacagtactgcattccgatattttaattgattcaagttttgattacattttttctttttgctgatttggaaaaaaatcttgattttgtatcgtcatcaaacggttgaatttagagatttattgtattttatatattctatataaacttaacttttctcgtgttcaagtagtagctaggtcgccgaccttctgcatgaatcacatgtctcgtaagtttagagtagtaagttaaaattcattaattgtattgtctcaagaaacacgcatgatacaatagtatttttaaaaaaagaaagtaaaatttttattttattttattgttttcatatatttcaggatcgaccatgatcagaagttttctagatgatatcgacacgaaatgtcagtctatagaaaccgttagcagtgatcagtgatcacttatatagttgctaaattgaccgttacttgtcatcgttttatgttttatcttatcacccaaactgttttttatcccacagtaaacacaattgatgacaactaaaccaaataatatacgtgtttcaaacttaaaagaagaaacagcatcgtggaagatagcccattcccagagtggctattttgtaattaatgaagttttccatgtcctcgatcaaaacaactaagcgacaaaaaggaccgcccgtactaactcgtgagatccaaacgctgctactttcacgcgcctctactacaaattcctctttgcactaacccaacatttaatttctcagattattgatgtaaatgatttaattaccagtttcaagctaataatcaacggtacataaccactttagccaaatcggtctggtttgatttatccaaattattttacacaaaccgatcttgtaagctaaccacaatgcaaatagctaaatggagagtataggacacgcgctataaagaacgtgtgtgggagtgggaatagttcatattaataccaccactaactataatgttcgcttcgtcatatctgactaattactcattaatttataaggtttttatttagtttcaattaaattataaaaaggtttgtcgtactattccactagattcctattaaaacctctgacacagaaagaagggtttcaatctcattaaagagaaaagaaacgattagagaaagagaagagggtagagacttcttttctttgtttctgtggaggctcttcttcttcttcttctctgtctctgtctctgtctctctgtaatcttctgtgctctccacaaatttgtctctcctctctctcgccgactccacaaattttgagcttctttttttgaagttcttgaggtaactaaatctcactctctttatagttttactttgtttgattttgtcaattttgactctttgaattctggggttttccattaaaaaaactcagaaagttctaagatttatctctgaattgagtaagttctattgaaattggcgtatggattcgacagatttttgagcacgatgtatgttttaaatttcgatgtcgacgcaccataaattttatatatatgaaattgaaatcttgataacaacagatttggtctcatcttcttcaagttgttgttgttgatgtggctgctgcttagagtaatgtttgttgctgcaagttggcttattgtctaatccgttatattattattttattttatttatatacagttgtgtttcgatttgtaacattttagattccgtctttgaccaattaaatctttcctccaaataaaatatttattttcttgctttcatgtttttaattttgacagctactactactaagttcgttttaagcatcaattcgtttatgcaaatagagagaatatcatgtcatgtcttaaaaaacaaagttgctcagaaacaatctttttttggttttgattttcaagttagtagtaggaggaggaggagatcttttaggaatctattcctctgttttttttctttggttgagaaggacccagagaaactcttgttttgttttcagagaatctctgtttgtggtctctctttatgaaatctttatctctatcttctttcagattctgcttcttctgtctagttacttagtggccaagattcacttatttgactcggcaggcaaaatctaccgaatatcttatcttcttgcaacttgtttatagacttaaagctgtgtacttactttgttttgttgcttcttcttatcctttgtcttgttctgtctcttggtcgtgatatgaattagttctttcttcttggttaaattgcagaacaagtgaaagagcttaatatccacaagactcttgtttctttcttaaatggctaaagtttattggccttatttcgatcctgaatatgagaacttgagctccagaatcaatcctccaaggtaaatcattattacatttcacacttgaaacccattgatgctacttccaagaagctcatactttttttctatgttgttgcagtgtttctatagataacactagctgcaaagaatgcactcttgtcaaggtaagcatcttcttcctctgattttagttgattcgatgattaaactgagattttgatgcatttgtgactgttaattattaggtggacagtatgaacaaacctggaatactacttgaagttgtgcaagtcctaaccgatctcgatctcactatcactaaagcttatatctcttctgatggtggatggttcatggacggtactaattttgcatatatgtatatacattcataacttattatttcattacaatgaagcatctcactgattctattttcacatctttttagtattccatgtcaccgatcaacaaggaaacaaggttactgatagcaaaaccatcgattacatcgagaaggtatattcatataagcagtagtttgtataatatatgcaattggtttgttatgacattatatgtgattctttttttttcttttttcttttaaaaggtgttaggaccaaagggtcatgcttcggcttcacaaaacacttggcctggtaaaagagtcggtgtccattcattaggcgaccacacatcgatagagattattgctcgtgatcgtcctggtctcttgtcggaggtttcagccgtactagcagacctcaacattaatgtggtggcagctgaagcatggactcacaaccgtaggattgcgtgtgtcctctatgtgaatgacaatgcaacttctagagccgttgatgatccagaaagattgtcttccatggaagaacagcttaacaatgtgctgcgtgggtgcgaagaacaagatgagaaatttgctcggacgagtctctccattgggtcgactcacgttgatcgaaggcttcatcagatgtttttcgctgatagagactacgaagcagtgactaagcttgatgattctgcttcttgcggattcgagcccaaaatcacggttgagcattgtgaagagaaaggttactccgtgataaacgtgagctgcgaggatcgaccaaagctcatgtttgacattgtatgcacgcttacggatatgcaatacattgtgtttcacgccacgatttcatcaagcggctctcatgcttctcaggagtatttcatcagacacaaagacggttgcactcttgacacagaaggagagaaagagagagttgtcaaatgtctggaagctgcaatccatagacgagtcagcgaggtaagtaaacacattttgttggtgtatgtttcttgcgttagaagcaacaataccttaagttattgtctgaaatttgattatagggttggagtttggagctctgcgcaaaggacagagttggattactgtcggaagtgacaaggattctgagagagcacgggctatcagtgtcgagagctggtgtgacaacagtaggagaacaagccgtcaacgttttctatgtgaaagatgcttcagggaatccagtggatgtgaagacgattgaggcgttacgcggagagattggacacagtatgatgattgacttcaagaataaagttccgagcagaaaatggaaagaagaaggtcaagccggaacaggaggaggatgggccaaaaccagtttcttctttgggaatttgctggagaagttactgccttgagagaaaaggtaactatgtgtggataaaacgtactgtaaaatgtgtattatgtatgatctagagggccttagtgtgatgtatgacttggtcagggattttggtggtttgcccgaagtcaaaccgaaccaaaactggttttcggttactttagactttagtcatagtaaaatgaacatgtctataaatgaataatatgcaactcttccaattggtaggcttgcttttgtctatgtaatatcaatccttcttgttatgtatttatctttggccaaatgtgatattttctgtagttttaatctcttcttttccttctattttgtaacttcttcgaatctttaatgtcaatatcattgcagtgagaaaaatggattatataattcagtgagtatacagaatatacacttataaatagtacacaagcctaaaaagtgataaatgggtgcatctgcgggtacttttgttacagtcgaaactgaaaaaaaaactaagtcaaccgcttgatgtttccatatcctagcgaataatattctttcttccataactttcatgtaagcaaagtacttaagagtataaactaagtttaaaaacattgtttaaacgagaaaaaataagaatttatattacgcatgtataacttagaacacttcttagggtttggatgttatgtccaattagtttacacaaaattaaaaaaataacacttataaaaatgtgagaatttaatatgtgcaaaatatattgaacctatgacactgcttaaagacctcatattatgtacaggatgttgtgtccaattattttacatatattaaactttaacctttaaaaacaaaaatattatgtgtatttaaaaagttaaaacattttttctaaaatattacataaaaagtaaaataaaattcttaaattttaaatagtggtgtaaaaatcaaaattaaaatattttttatattaaaatgttagaatttaatatgtgtaagatatattgaacctaggacaccgctaaaggacctcatactatggacgagatgttgtgtccaatcattttacacatattaaaaattaacattttttcttaaaaatattatatatatttaatataattttttatctaaaaatattaaaaattaactttaaacaaaaacttgaataaaaattgcaaaaaaactttaaatatccgtaggaaaaaactccattaattaaaattataaaatatatgaatttaagtaaacaagaaaatgggctgagaattaaccttaagccttgagccgttctctgccccgttagtcgacgaagaaactcgatgagtattggatcttcttcaacctcacagtaaagcccattgacaaggcccattaatgcgagtcgtcagccgttctctgctcccgtttgtcgacgaagaaactcgatgagttttttctgcatcttctacatcgtcaactgatgctcgtccgtcgctttcacggtccctctctcaatcgtaacgaattaccaataacaaggtgaaattaattcaaagatccgacctaaaaatcgttctcgattaactggagaaagaagatggaaatcaaattacgaaactttatcgttttctccgatcaaatcttacggatacgagaatgaatttattgaagagatcatcgacttacctcaatatcggaaaggaccatcggcgatcctctctataagaacatagaatttggaaaagttagggttttttctgtttggaagaaggaggagcgtggagattttttgatttctcatgaaagaagagatgcgtgagacagattatggagatcaatcacgaaatcagatgctttcctccgatcaaatctaacgaatagatattgagatgaagaatgaagttattgagatcatcggcttacttcaatatcaaagggaccatcggcgatcctcactataaaaacagagaacttgaaaaagataggattttttttttttccgtgtggaagaagaagaaggagcgtacagaagtttttgatttctcatgaaagaagagataaccgtcatctgtagcaacctagacagtatttataagcaaaaagtatacacaaaaaacaaaaaggaaactttcgactgatttccttttttttctttctactaggtttacgttgtttccttttattcaattatgctgttaaacggtaaaaaaaaaggtctaataacggtcatatttctcctactgcgtaataatttatcaaggtaaaaagtaatttacttgagtgactaaaccattttatgtatcatacaaaacttttgaaacagaggatattctccaatggcgaggacagagctcaaagttgaaccacgtgccactattgcatctaacttttatttcgttagccttttgattccattcccctctaaagttctttcattttttgcaacgctgctttctcaactgagtaacgagtttcacattaatgttttgatgcgatgatcaagactgtggaagaatgcttcattagaatccctaatctcttacctgttaggccactagtgttcaaaaaccgccttcaggtacaggaagctacccccagctcggctcctgaacccgatactcggtttattctcgaccacagagttctgacttgctgaagaaccatcagtttcaatccctagtgacacggccagaagactggctgctacagatatagctgatccattctttgacccagacggatttgctcataaaaacatatgaattcactgatatgaaaagctgactcaagtatatgtgagtaggaagaaacacgtgctaaatgaggaagagcacgtgaagactaatctagatgcatttgtctataaatagtgaacgtagacgtgtaattagcttgttgttgttaagtgacatatgtgtcattaagagaatgatatattcagtgatgtgctgagtagttctcatctgtaacagaaacatagtatcattgttgagaaataaatattagactttccatttctcaacattaacaaaatggtgcggtgaactacactagagtttgcaagctgatataactcattgtactctttgcattcgattaatatacaacagaaaagttcattgactaacgatccatggtccaaaatttcaccagtcaaagagttttgggcctttaatcaaattggtgcattgacttgggcatgagaatgggtccattgacttagcacaagcagtatataataatatgcaacatatataatccagtgaataggttatgggtgggtgatcattgtgtttctctgtagtttaattaagtattaaacgtaattatttttatttatgaaatactaagtttctcctattaaaataaggttgagtatatgcccttgaatttggggagggctaatgcaaagtagatatgtgacaaagtggaaaagcaattaaaagaaaacggcatagagtgcggcctcgggtaaggctaacagctagctttctctacatatgcacgacactaagaaaaaagtaaacggcttgatgtttccatctcttatcgaacaatattgtttaaagaatacagcttgtgtattgactttcaaatcttttatatattccgtgaggatgcaaagaaaacaagccgtcgaattcatgttatctatttcttttcttgagcatatgacagattttgatttaattactttttgttgacatgtcgaaagaattgaaactacgatagattccttacatatatgaatatatccctttataaaattagttaccatatgttctctttgttacatgttgttgaatcatagcaaattacaaatggatgataaacttatggttaatgagatactatagagtaatcaaaaccgtaagataacttaactatcagtataaatgatacattgaaaaatgataactacttgattaccatgatcggatgaaaacttggttaattaataacataacttgtactaattatcacagaactaactgaatcttgggttttaggatgatatgggaggtggagggaatgaagaagatttggtgggaagctgccccattagagcaaaaaacgtgcccaccaactcaaaggcctcattagcccccaatgtgcatttttgttatctttaccagttgcgttttttcttctgttttaaaaaaaaaaatatatctcatagtttgttttaattcaaggtgcatttatttcctggctattaaatctgcaattcttgtacaatagttcttgtctttttcatgaaaataggttttgttttatttgcacaagataaaatatcttcgaagctagtaaaatagtaaaagaaggaaagagtccattaagtttataggtgcatgtgggtttcacagagagttcagaaaatacaaatagaaagctatactttttacaatggagattattcttttgtgtaacgtttttatgtaagataatgtcattttataagttactaattcactcttttttattatttttgttggtgttgtttttctacttctatagatacaaaaacataatatttgagttgttttacactgtcttgtaagttctaattgattaatgttatgaacttagtttatgcaacgttctacaaacaaagagctaattttacaccagcaaaaatccctcaagtcctacaattatatgtccatcacaaccgagttcgaacaatcatataataattatttttgttaatgaaacgaggaacgtatgatatgagaaaaggtcatttcttaatttaaataaatgaaacagtgatatatctttggacgttatctctcgacttgtaaacgagtttaattacattatgcgactcaactttgtaatcaattatttaaagttctcaatttttgtcaattccgttacgtaaattattattagattaacaatttcaataagataacttctcttgaatattttccgaatatttcgttttaattagatattacaactatggttataaaaataaaataaaataaccgtaaaagagtcgtcgaatttggaatataatttgtaatagtactgtattctcctgtcagttttagacacgtggcagttcacgtgtcatatagtcataacccgtacgtttactctttgcctctttcccttttatattcaaaactcctttttgattttgtctatcttatctcgtgaatcgttaattcgttatcaaaagagcttaaaaagctttaaaaaattaacggattagtaataattcaaccgaagagaaacccaaggcaccgaagaacacgatttcagaggtatgatccggaaaaaaaaatccaaagttttgatccttttgttttttggtgagcaaaaaaactggtcctacgctagtcaatggacattctcctaaatttttgtctctgtttttttagattgtaaattataaagtaatttctccaactttctggaaaaatccatccagcaaaagaaaagaataattggttttattgatcaaagatcttcagttttcaaaattaagcactaattatggggttttgtttattaatgtcctaaaaaagagttacacatagagagacattaatgcttgcagtttagtttaaagagttttaagaccatatctcactcaatccttatttccttacatttgtcgtcttttgatgtcatagactcagagatatttatttatcttctttctctctcatttctcattctcatatttacttttgatctcgtggtgttagaatcaaagaaaccgcttcaaggatggtgagtgaaggagcaacaagaaaagaacttaacctctgtttcgagaatatgaagatggaaggagttttgatctctgagtggaaagatatccctgtggagcttctcatgaagattttaaaccttgttgatgatcggactgtgatcattgcttcttgtatttgtagtggctggagagatgctgtttcccttggcctcactcgcctctccctctcttggtatgtctctgtttcattctttgtttgattgtgttatgatgtttgtattagaagatacttatatgcgaaaaagtgttttgggatttgaataaatatttggattgatggatgataaattgatgagaccatgcctggtgattgaaagagtcaaacttttttatgatttggtcagatttttgttatgaggacagtttctggatgactgatcacaatttgtatttaactaggaggatgattttgatttttgtgtttgcttgttgtttgttctttaggtgcaagaagaatatgaacagtttggttctatctcttgctcccaaattcgtaaagcttcagactttagtactgcgacaggacaaaccgcagcttgaggacaacgcggtggaagccatagcaaatcactgtcatgagctacaagatttggacttaagcaaaagctcgaaaatcactgaccattccctatattcacttgctcgtggttgtactaacctgactaaactcaaccttagcggctgcacttcgttcagcgacactgctcttgcgcatttgacaagattttgcaggaagctcaaaattctgaatctttgtggttgtgttgaagctgtatctgacaatacattgcaggtggcttttaaagattcaactctctctaatactattagctttctatgttctttgtctcgatgataaccgaccaattcttcatccgttttgtgcaggctattggagaaaactgcaatcagttgcagtcactaaacttgggatggtgtgagaatataagtgatgatggagttatgagtttagcttatggttgtcctgatttaagaactcttgatctttgtagctgtgttctaatcacaggtaaaaccgagaaacccgaaccagagtttctttgtcatctcttaaacatttcttgttgttacagatgagagtgttgtggctttggcgaatcggtgcattcacttgaggtcattggggttatactactgcagaaacattacagacagagcaatgtactctttagctcagagcggagtcaagaacaaacacgagatgtggcgagcggtaaagaaaggaaaattcgatgaagaaggactaagaagccttaacattagtcaatgcacttacctaacaccttcagctgttcaagctgtctgtgatacattccctgctctccacacttgttcaggcagacattcacttgtcatgagcggttgtttgaatctacaatctgttcattgtgcttgtatccttcaagctcaccgcactcacaccgtttaccctcacccggcgcattgaaacggtgtgtgagccagagggtctactactctctagtatgtgtgtacatacatataaccatatggtgttaataaagcttctttgagttccttctttgtctttgatgcaatcttaagattttaacattacctagtcttgaaaatcttgtaatgaatcgcgaaatacttatttcttctaacaatttgtttaagttgcatccatcaatcaataatcatatcattaaagaatgaataacacagaaataagatgatgctgctttgcatgtgagactaaaccggaaccggaaatggttaaaaccaaatcggaaaatgattttgaagtacaatagtagttacaggttttatctttcaagtagttttctccaagctatggaagtagattgtcggcgttattacgtacgtcttcttcaatcatgcagcagcagaaatcgcgaaactttatggagacaaaccaatggattgctcttgaagaagggttttcttagttcaattgtcattgttgctaaccatctcctccaaatgtactcccggtctggtaaaatgggaattgcgcggaacttgttcgacgaaatgcctgatagaaactatttctcgtggaacactatgattgaagggtacatgaattctggggaaaagggaacgtctttgaggttttttgatatgatgccagaaagagatgggtactcttggaacgtggttgtttccgggtttgctaaagctggtgagctaagtgtcgctaggaggttattcaatgccatgccggaaaaagatgttgtgacgttgaactctctgcttcatggatatattttaaacggttatgcagaggaagctctgaggttgtttaaagaattgaattttagcgctgatgcgatcacattgacgacagttcttaaagcttgtgctgagttagaagctttgaaatgtgggaagcagatacatgctcagattctgatcggtggtgttgaatgtgactcgaaaatgaatagttctttagttaatgtgtatgcaaagtgtggtgatttgagaatggcaagctatatgctggagcagattagggaacctgatgaccattctctatctgccttaatttcaggttatgcaaattgtgggagagtgaatgagtctagaggacttttcgataggaaaagtaacagatgtgtaattctatggaactctatgatttcaggctatattgctaacaatatgaaaatggaggcattggttcttttcaatgagatgaggaatgaaacccgggaagattctcgtacgctggcagcggttataaatgcttgcatcggtttgggcttcctagagactggtaaacaaatgcattgtcatgcttgtaaatttgggttaattgatgacattgttgtagctagcactttgcttgacatgtactccaagtgtggaagcccaatggaagcttgcaaacttttcagtgaggtcgaatcctatgacactatcttacttaacagtatgatcaaggtatatttcagctgcggaagaatcgatgatgcaaaacgggtatttgagagaattgaaaataagagcttgatttcttggaactcaatgactaacggattcagtcaaaatggttgtactgttgaaactttagagtatttccatcagatgcataagctggatttgcctacagatgaggttagcctctctagtgtcattagtgcgtgtgcaagtatatcttctctcgaactcggtgagcaagtttttgcgagggcaactattgttggtcttgactctgatcaagtagtatcatcttctctcattgatctctactgcaagtgtggattcgttgagcatggcaggagagtattcgatacaatggttaaatcagatgaagtaccatggaactcaatgatatcaggttatgctacgaatggtcaaggatttgaagcgattgacttgttcaagaaaatgagtgttgctggtataagacctactcagatcacttttatggttgttctaacagcatgcaattactgtggtttagtcgaagagggacgaaaattgtttgagtcaatgaaggttgatcatggttttgttccagataaagagcatttttcatgtatggttgatcttttggctcgtgctggttatgtggaagaagctataaatcttgtagaagagatgcctttcgatgtggatggaagcatgtggtcatctattctaagaggatgtgtagcaaatggatataaagccatgggaaagaaagctgctgagaagattatagagcttgaacctgagaactcagttgcttatgtgcagttgtccgctatattcgcaacctcgggagattgggaaagctcggcgcttgtaagaaaactgatgagggagaacaatgtgacaaagaatccaggttctagttggactgattgttgaatgaatactcaatttgagtgtatagcataacactgatagaaagaaaattacaacaaaacagtatagcaatcttgtaatgattacaaagtagtggagtttttcttcttttagaaaataaacttattttaacaatttgttaagtttgatcccatcaattatcatcattacatatatttataaagaattaataacttaagaagctgcatcacatttcacatgtgagacccatcaaattgaaatatttgagtgtggtattgatcatttgcctttgtatacaatttcatcatcgtctacatcgaatgctggattgcagagacatctgaaaagtctaccaatcccctgtaaatgtcaaatcaagaatctaagtttctgtttttacattattattcatagaaatgacttgaaaagtgagaatctattgtacctgagtaagcagaggagttctgtatgaaagtggttgtgaagaatcgtcatcgctgctactgtcatcatcgtcgctgtcttcatcttcttttcttgatgttgtaccgttcttcgattgcttttcttgctgcacaagccaacaacaatcttgaatcagcacaagaaacataaacagatcagataatgtgattatggtaaatgttattgaaaacctgaaaaatcttcccaagaatcttgagagccattgctctagacttgagctcctcctttctcaaattgttttcgcgaaagacctaaaccagtttttgtcaagaatcttatgtctgagatttcgaatataagcaacagaatatctaaagcactactcaccatctgacacacatgtaacagagtcacttcaatgtcgacaacattaagtttccacaaagatcccatcaatgtttctttgttggtctgaatatgagactctaactcatttgctggactagtcccatctttctttaatctccggttactctcttcttgcagctgaagtaactgtaaagctcctttagctgcactaatctgtgatttccaagaatgacctttgttcctaacccattcagctacaaatggaactcctaagtaaagagctctcttcccaagttcttgagctgcttgtcttgtgtatacatatccaattgtatgcaacatatccgctccaaaagcttcattcataagacttcaattcagaatgagaggaaatgtaaaagtaaaagaaaaagaaggaaggagaaaatacagtacctgcatctgaaagtctcttggcttcagattctgcgcggcttatgaatccttctttgtctccgtggacatattgactcagaaaatctttgagaaaccttgaaaggttttcttctctttctttctgaacagcctgcaaaagaaacaaagatctttctttatgtaagatcagatcaagaagatggttatattagttataacatatggtttttgatttgcctttagtttgtcttgaaactgatcagagttttcgatttcagaagccatttgagtggaagccattgatgcaacagccaagtgaccgatataatcctcgaatagttcacttccgaaaagaagagcgaaaacagccgttggatcaaccattgtttctctaattgatcaaaaacaccattaaacattgtcaaataaagaagagagaaacacataataaaaaaggagaaaaaaaagaagaaaaaattacttgggagctgagaattttccagtccgatcatacgcttcacgatgaacaggatcacttagaacctggtaagcttcaccaagaacctgtctccaagaagaagagaaaacacttgatttgatcaaaataatattataacaagaaaaatgaatgacattaaaagaattttaacttgcctgaaacttttcagcagctagaggatcaccttgattcttgtcaggatgaacttgtcttgcctaaagatttaagaatcagtcagaccaaagacacacagatctatgtcacaactcaaaaagaaaaaagagagaaaaactaaccttgatgtaataagccttgcgaatctcttcctcagaagcagagggagtgacaccaagaacatcataatacactgtttccttcaccatgatcagacaaagatgtggaaggagtttcaggaaaagatgtgttgataatcgagtagataagaaaagaaacgcttggtttggtgtgtgtgaagcttttaggagatgtggggaagaagaagttcacaaaagtgttctttcttgatcttgatctgcttcaagaagctgaaaaagaaaagagattggctttacagtgatgatctgcacttttctaataaactaattgcgccgcttttgagcgggggactacaacaacactctctctttttaactgtctacttagtgctttttatcattcatttcatgtcctctttttctcttcttcctcctttttgcttattctccatttcaaaatacttgttaggcaatgatttagacatttccattagaccctaaagagtatagagtttaaaacacgatcgcgtttggacctcgtaacatgattgcattatggattgttgagcgttgcagaagaaataatacatatttcaagagactgatacagggaagttattattatattagctatgaatccggttagatatttttacccaacctgttttatggataataacttctatctacttacagatacactttgaatacgcttaacttttgagttggatttcaaggtgagtcacggatcacagaatcacaatcaaaaaggaaatggctaatgaaaaaaataaaggtcctaccgggagtcgaacccaggtcgctggattcaaagtccagagtgctaaccactacaccatagaaccttgttgtactatacctgatgtcatcattacttaacctgacatgaaacaacgaatcgtcagtacaagtgtctagtgttgggtcgctttctttttgtcgtcaaccaacttattgatacatgaaaaccaaaattgcagaaaaaaacaagattataaagtgttgcacaaaatttgagtagagaaggttcggtgagtgatataacaatttggcaagtaatagtttgcctaagctcaaagttttgaagacagtcttcttcttcatgactatcttcctctcccacgtttacctccacctcctcttcctcctcctctcttaccacctctgctactagtgctagcaccaccacgacgaccaccaaaatccctaccgccacttcttccacctctatcgctgctactgccaaaatcccttcctccaccaccaaaatccctgctgccaccacggcctcccctggccccaccaccacggcctcccctggccccacctcttccacctcttccgcctctcttgctctgcagataagaaactttgtttgccttttgctgtctctccttacgcacctggtccagatctttgatctctgaacgaacatgtgcgttaggcactgatccttgccgtctcttcccatctcggcctcctctacctgccaagttttctctttagacctattgacaactcaaaggtggcaaaacgctgaacttgtgttaaaaaaacgctgtccaacattaattacctgacattcgtgtggtttcgtctgcatcaccgctgtctcgggatactttcttgtgagacctctcttgccatctcttgtatatccctgtcttctttgcagtcgctttagctccactctctgtctttatctatttagtctcaagaaccttagtgttggcttaaagcctcccagagaatcatcgaatgttttaaagcaaagacacttttactacctttccactggctgttactcgatctccattgttcaacttgatgtacttcttacctttctgttaagaaagacaaatccaatatttttaaaagattaagattacagttggggcaattgttatgaagtaaccacaactcttaccttgtcccagtgataatttgattgttgctgctttatcccttgcccatcatctgcaactagatctagaacagcagcgtccaacctacaatccgaaatcgtcaatatctgacagaaatttttgttattgcaacatttaaatgcaatcccttgatccttctatggaatgtcacaaatagccacatcaaaaatcattttacctattcgatccaaatccttcgttacccctcagagatagccctgcctctgaatgctacgtgcataagagtaataaagagtcaaactctgcatcatctcaatatgatcataagcattgtagctttgactgctaatgcgtactgacacagaaaatgcttttattcaacgaaaataacatacatgatttactggtatggagctgataaagaattcatcgtccttgaaggtttcttgtgcctttcttttcttaccgcttactgaaaacaatggagagtttatttgaaggtaaggtaaccaaagaagtggaaaaccaaccatgcaccacaaactattcaaaagatcaactataacagactttaacatagaattaaaataacaagagcacaagcagcacgcatacctttgcttccctctactgtgccatcaacaaaagaagttgtaggttcagcttcctagatatcaaaacatttaagtgagtgaaactaatggcaaagaaagaagcatgtggcacagtttaatattagaaactgcaagaaataccatctccaaatgattattggaagtcttttgattctgctgatgtcttgtattgatgatctcctcatgaatagctcttttcttcttcatcacatcaacccattggccagcgggaccctgcacaagaaccaaaacggtttggcttaggctaattataaagaaatatcagaaatacacatataaactaccagccaagtacagatttttgagaaagatgataaatactataatagtcaaacaaacaaagggaaggaaaataagataggaatagcgagggtaccttcacatgtttggatttggcaacttcaccttctgcttcaagtatcgtttgcttgggtctagcacatatcagccattattctaattaataacgttggtattaaagtgcatatgatcataccatcttgaagtctggtcgtatcaaggacataaatagaacacgatgattatactactcacctgaaatttttaattttctggaaaaacgacattgcctctaattccccagtttcaataatgcttctgaagatgggatgcaagccttctcgtggtaaatcctttgctctcctaatggattcttttgacggtgagggttttgtttttgaatacaagcgaaaagctttggtggatgttcgttcaagggaatctaattctgcagatgaatcaatcatttctctggttctattaaagataagatcaatggttttctgtgggaaacgaccatagacggtgactccactatcaattgcttgactagttttggtcattacttcttccatgttcttcaagacctcatcctcagtgggcgctggcctgaccggttttgagaggaacagatgaagatccaacatatatggcatatcctcaggtgtaacaaaggaatatgcacagcctgtacgaccagccctggcagctcttcccacacgatgaacaaaaatcttcggtctcggagggaaatcccagtttataacattatcaagcaatggtatgtcaatacccctagcagcaatatctgtcacaatcaacaacatagtcttcctcgctctgaaccttgatacatgaatcttacgtgcatcttgatccatatcaccataacatacagatggctcaatattctccaacttaaacaatgagttgacaaattccacatgatgctttgtcgaaacaaatatcaaggtctgttgatctgaacttatatgctccctaaccaagtacagcaatgcagaatacttctcttccggtcgtacagtcaaaaacgaaagcttcaaatcgggacttatcttattctcaacatctaaacgaacaagctgaggctcacgcaaaccagcctttgcaaattcagcaagggcacttggtaaagtggcactaaatagcaaagtctgcctattctcacttaactgagttagaatctgatgtaactgttcagcaaaccccataccaaacagactatctgcctcatcaaaaactacatactcaaccgtccttagcgtcatatcatcaacctcagataaaagatgcataagtctcccaggagtagcaataatcacatcaggtccctttgttaactcttcaaactggtcttccatactatctccaccaaccagtaaggatacacgaagatctgatataacaaacacaacaaatttccttaatcactatcccttttcaacaacaaaagggaaagtttgtaaattgaattcattaaaccaacctgtaaatttgccaagttccttggtgaacttcagagtctgctcagctaagtcacgagtaggagacaagatgagtgctctaacacctccttgaggaacgtgttgtttgagcttctcaagcatagggatgagaaaagctgcggtttttccagaaccggttcgagccatagcgacaacatcgacgccagagagaataagcggcatcgtcttcctctgaattggtgtaggaactttgtaaccctttttcttgattgcattgaagacattaggtccgagatttagtgactcgaatcctccagatttgcctttcttcttctgtttctctttacggtgaagctcagtcactgagctcacgaggaagccctttccttcaaccatggtatgcagactttacgactgcagaggaatcccaaaattagggtttaaaagcgaagaagatgacttcgacgcgagttttgttagtctgggttttagggtttaaagaaaagagacgactcacaaaatacctttcgcgggctttacttgggcctatacttaacaccattaaggcccattaatatacttaaatacgtttttctaacaacggcaatagttacattattgatgagaccattgcttgagagagttccaaaaaaaaaaaaaaatgtccctatcttcatgatttggttgtcccaagagcgtttctgaggtttgaatagcgagcttcaagctcaaaccacgaatctaaatccaccaaactattgaattcctcaaaagtagccatcttttgcaagtgatctcgagtgctaccgttttctttaagagtcttgagaacatcgaccagagctcgagtcgatgcatagagtgcggtaagggggtgaactatcaagtggaatcccatttctttaagctcatcaggcgtgtgtaatggtgtgactcctccttcaatcatgttgcaaactctataaccttttgtgcgttttccaatttccttgagctcatcgtcgtctcttggtgcctctacaaaggaagcatcagctcctgcctgcaaatttacaacaactctgcttagagtttaacatcaattgtgtttttcttttttgtttactggtaacaagtttgttacctccatgtatagattaacacgtgcaatggcgtcttcaagccctgattttgcagaagtagcacgcacgtctgttcttgcgacaaggaagaagtcagagtctccaatagcatctcgagctgatgctatttttgcggcatgttcttctgctggtatcacctgtttaccacgcatatgacctacacaaaaacacacacattgagattatgatctgtcaagtgtgtccattgagtgacattagaacagtgacttagaaaatgaagatttcacacataccacacttctttggccatgcttggtcctaacaagaatgaagcaatcaaatgttaaatgaacaatatccaaagactcttgatcaattctaagacagaggaactcgtcaaagaagcagaggtgacaaaaaaagaaggcaatttacctcaaggaagcaaccagcagcaccagctgcaatcaaatcctttacggttctttgaatgtttagcgcatttcctccaccggtatcttgaaaagatcaaaagaaacctatgaagagaactataaccaagcaaatccactattttcaaaaagctatgaagagaactataagcaagcaagcgactctaaccaagaaagattgatactttcaatctttggtaaagaatcaacgactcaatgtttttaaatgttttttttccttttttggttttagttaagcttcttgcattctttaatgatgtctttattatactatcaaaattttgcaactttaccagcatctgcaatgatgggtatattaggagctgacgcacacaccgaccttgccgtcgcagccatctccggtggtctaaaacgacgaaagaacacaaataaaacgaaagcatacaaacaaaaaattactaaagaaagaaaaaaaaaaaggtggcgcacgttagcaaaccgaaatcgggttttcccaggagagaagcggataaggcgtaaccggatataaaaccagcggagaatccggtttgctgcacaatagccgcggataaggcatcgtagcatccaggcataagcacaatgccttgttcttcaatcaggcgatgaaaacgtgtttggattctcgctgtcggattcaccaatctcgccgcgcgtgggttccgtcggaatgttggtgaagctgtaaggtttaagctgctacaacagagtgaagttgttttgacagccattaacatcgacattcttcgaagcctcgaacaagttttttcttctctctaatcgagttagactctgacccacacgcttgggattttaatagagagcacgtggttattatatctcggtcttatcttatggtaacagtatctcaaagactcaaaccacaaggtattgtgaaaatgttagaggcaatctaacaataaatgtataatttggttagcttaagctcatcatagaaatgggcctttatgtcaccaaacctatttcacaacataacacaagagcccacaaaacaacgactcctttctccaccagaacaagcacgacaaaggcaagagagttgcaaaagacctataagatgataacaatcgaaaagatgtaaattttgagaaaaatcaaaataaacaagaaagatttcattgtttttcactttttctccatttctactttgattttacatactctatgggccaaccaatttccaacctaatgcttgataaaaaatgattcggttttactatctcaacaaattgggcctacaacatccaatttcatgtagtgacttgtttttgcctttttcacatctcaacaaattgggtcgtttgtatttaagaaattgttacagctttttagactgaattttactttatggctttatgctctctttttccgttttgattaagggtgaatatgtaaactgttgataccatctgattttttttattttttatttttcttgtgtgcaactataccatctgaattcaattgacattttagccaaataaaaaagattggtccacttggatggctgtaaaaaagtttagtggaagtatttatagggcttgttggcaatcttcaccaacggctataatgttgatctttttaaaattaaacttaccgttcgactgtcttctcaacgatttgacaattagccgttagattagtattactgatttattattaacaaacccatttcttttcttatttttgaataagctaaatcaggccaataaaagggacaagtagagatgggctatttctttttttctctttttttttttcttatgtagtagagaaaagcctttattcttagagctatcatttaccacccattaaccagaagctgagaaatgaagcaagccgaaacgaatttgtagttttggacggtgaaattatatcgggcctttaatgggcatgtgaatagagttgagagtctttttgccccaaataatcgtttaagggagtattggctcgttggtttaatattgggccgaaacgagattgggaagaagaacaatgtcggtttaatccggttagggtcgtgggctgattctggttcacctttatagcgtaagcgaacaaacattgaaaatggggaagccaaattagttaccatccctaactcagttttgagacgtagtatgaatgagccacggcagaacctacgacctaactcgataaagtaatggttactcttggagacggaagaaagcacaaagattttgataaggctttctagttggtgaaatggtcaaaatcgctcggagagccatcataggagcggggaggtgctatctgaatatcccaatgcatcaagacaagatggattcagaaaacaaagaaattaaacaaacattttaaaatatgctcttagttttagataatataatgttttcaataccaattatcttacactgatagtggtcaagttactaatcacttttaataaattggtgatagtcaaacgtattgaaaattatcgatttaaaaatatttgaattcaaaaccattttagtgaaagtttgcattgtagttttgattatccgatcaatctttaatataattacgtcaataataactgaaatccttgaattaaccgttacccgattcataagcactactttccgatcaaaaccaatgagataaaataacttttaaaccctccaaataaaaagagaaaaccttaaaaaccaatttctgttcggtggggatgatgatcggactcggaccggtctaaccgactggattaaaaagtctttaacaacgacaagcttaaaaatttgcctcttagtggcttcaaaacgcaatcgtttcgcttaatactattattttctctatctcgtttaaccaaaaaaaaaaacgagttggaggaaaaaaaaaaccaagaaaaaagaataaaaagcaaaaagcattgagcgtctccggagattaggattaaattagggcataacccttatcggagatttgaagccatgggaagaagaaaaatcgagatcaagcgaatcgagaacaaaagcagtcgacaagtcactttctccaaacgacgcaatggtctcatcgacaaagctcgacaactttcgattctctgtgaatcctccgtcgctgttgtcgtcgtatctgcctccggaaaactctatgactcttcctccggtgacgagtaagaagatactttccttttctgggtctcactcgatttttgtgcttttttactttgtttaattactttctccatatagaagcttcaaatctagggctttttgattccatcaaatcaactgagattttctccttgttttctgtatgaagatagcagatgcgtaagctttaacctaatttaagactaaacattttgatcgccaagatatgttcttgatgttcgtttcgtgttttttttttcgtgtttttttttttttcattttaaaatcatttttatctctttttttaccttcatttgtgacgaaatttaatattgcatgttattcaagaaacttttctacacgtggtgattcgttcttgatgttgtttaagtaatctttgtattgctagttccatctgttgttcactttgaagcttcgttttttcatataagaaacaatatgtttagattgttcaaattttgagatttggtaattatattcaatattgcaatgcacttcaagtagttttgttgagagattatttggggttagtggtaacattaatcgaatatctttggttcaaattggttaacacattgtactttatgttgatccaaaatgtattgtagatcttttcttttgtaattctctttaaggaataaggtttatctagttgattttgatggtttattgtagtgctgggataagtttccacattgatactcgccacacattcttcattacttaactaattggatatcgattttaacccttttaatcgtaatttgttgtgtgtttatgacaccatacaagatacattatgtcttactgagtgactctttgttgctctctaagatgttgtagtttggatttctttgctaaagaaactcaaactataactgattttactgctaccatatatatgtcagtggcctagtaggttcattaagtagaaatcggtcgccaattttactaattgggagaaaccactagactacaaccaaatgttcaatgactttaatagtcttctgttatttgtcgtggatatttttaaccccatgaacttttgtatctagaaaaatctcatccacttctcttttagaatactttgaatgcgactaaaagtgagttttttttttctaatagacctaagataaaatcatcaatggataagtaggaaatggaaaggtaactcttgtcagtatgtgtatatatacagctccttctcatttccttgatgttgactccataaatgcttgatcatgaaagcaaatttgttaaatttgtaaccaacaaaatgcacagactatagacgaagtattaggaaccgtatctatctgtctccattttacaatagtcaagctctagttgtagctagtttctttatttagttcttataccttaacaaagtggcactatgcaaagtgtttttagttgagattagtcgtcttatgcgtcttactaattgttcattttttcttctttttgtgattgatgtaaaattactaagtcacaacttgagatgttactaaaaagataagaacgtgtaataactgaagtgaatttgaagccagtctctattcatatcatagcattaatagatcatggacaacacatatataggattagagctgtcatgaccttcccggaaatgctaaatcagtttcttggtttatcctttttggagtatcatgatatcatttagccaaaggtttttggtttcagtattccgattcgtttgacgttatgtgtgaaagcgtcaataactaaaacttggattgactagtcaaaatataaactgattgcattgaattcttgaaaattttcccttaaaatgaacatgaatttcatcaagattttgtcttttggaaggatgtgatttataatctatacaatcatacattttgcatgatattagttttttgaagaaccaaaaatagagcttctttataaaactgatttagccttgataagaaaaagaaggtagataatcgaactcatggggatgagttaaaaatgtgtgcacttagtttctaaaaccttttgaagtcgaaacaatgacaatattggctgcgaagttgatatataacaggatcttaaagttgaaattgtaaattcagattttaattttagagcaccagatgatcagagtttcagatttacatttgaagtataaaacattttgaacacatatatctaaagcagtaacttcaaaaatagggtaactaatagtaacttacattgttttttttaatgcttttatacttactatcatttttatatatagatgcctggttaagtaaagatgattatcaaaaactgttggttagtaacagaaattgttgcaaatgtaacatattatataagctttctttcactttggtgcattctctctaaataatggcctctattgatgcagtatctgattcttagttttgaaatggtttttgcataaattattgttctaatgcatttttgttttatctccagcatttccaagatcattgatcgttatgaaatacaacatgctgatgaacttagagccttagtaagtaattagctaagaacgtcattctaatattcttctggatgcggtttttggtgttatgaaggatagaagcgctgttcaagccggagaaacctcaatgttttgaactcgtaacaccgaacttaattctctagagttacagttattgtgtctactggaaaatacaagaacttcacaatctttctgaccattccttttcttcatgtgcaggatcttgaagaaaaaattcagaattatcttccacacaaggagttactagaaacagtccaaaggttagcagtacgacacatttttctcccctcttcttctgataaaaaaaatgttttttttcttttgtctacttgtgaatacagcaagcttgaagaaccaaatgtcgataatgtaagtgtagattctctaatttctctggaggaacaacttgagactgctctgtccgtaagtagagctaggaaggtatatgtgctgctactaagtgattcaaccaattactccacaaaaccttctttttagttagttatcctagaacaatcttttgacataaatcttaatgtcttgttataggcagaactgatgatggagtatatcgagtcccttaaagaaaaggttagtgctttggtttttattttcgataaaggccatattctaggctatgatgattcttgaattctattaacctgctgagtctacagattactatatatatatatatatatcttttggtcttgtcttagttcctgatttagtattggcttcattcaggtgaaaccctaatgagaattaaaaaaacaagcagttttaaactcttgatcaaatccaacctttccctcataaagtgtcgaatttggatgaggatgatttatgtttcgagaaggaaacatgtttggaaatagctatagaagttgttagaaactaatgaccttatgatcttttccaaacaggagaaattgctgagagaagagaaccaggttctggctagccaggtaacaatgaccacaatatcttctgctcttgaagctaattaatcactttatacgtccccgttatagagagatacacatatacacgtacatgaaaactaaaagttgaaggactttgatggatactagacaattatagtgaaaccctaaatatgtgataagtgataacaaaatgcttttaaaatctatctttcttgttaatttagtagctgtcagagaagaaaggtatgtctcaccgatgaaagatactcaaaacccggtatttttaatttgtgaaatttgcaaataaaaaaaatgctttctacaagatagattaatttcttgcaatgtttagtagctgtagaaaaaaaagaaatgtaagaaagtttcttacagatgggaaagaatacgttgctggcaacagatgatgagagaggaatgtttccgggaagtagctccggcaacaaaataccggagactctcccgctgctcaattagccaccatcatcaacggctgagttttcaccttaaactcaaagcctgattcataattaagagaataaatttgtatattataaaaagctgtgtaatctcaaaccttttatcttcctctagtgtggaatttaaggtcaaaaagaaaacgagaaagtatggatcagtgttgtacctccttcggagacaagatcagagtttgtgtgtttgtgtctgaatgtacggattggatttttaaagttgtgctttctttcttcagcgtgaagaaccctagaccttcttatttctttttttttttactttttttttttataactttaattatttgattatttgtcttacattacgtggcaaagttatttagttgcatctcttttaatttgatcaaaaccatatcagatattttgctcttttttccaagtttagtgattctgtttttgagagctccaaactatataagatatttttcaccttttccaagttttattatttgtgtttttgaagaactcaaaaaagccagcttttgaactctgtttcatgttttggttctttctgatgaatccagatccatacaaccgtatgccaaactcactgctcgtatgttgtttagtataatattacaggattctcaactttttacaaatacacatttatgtaccgctctttgtgttcttagtcttgagaaacacttgagtaacttgttgaagatctgatatatccaaaaaagttctaaagtctaaacaatgcggaatgaactagctatcctcttcagatccttgtagtgtctcttccattgaagacctatagaatcaaacataagcagagcaattaactatgtgtacaaaccaaacaaaaggtgtttgctctgtctttaaatctctgactagaagagaggttttgccttaccgtttccggtgacactgaacaagtaaaggcggtttccggcagctgttgcagttatcagtacatgaggcggctctagctcgaattggtaatagagtctaccatcgtgttctgcaacattggaacttaacaccttcccttctacgttttctccaataacttctggtccaaacgcgttaatcaccttcgctggttgtccaatattttcaatcttaacatcgtccccgaggtctgtataagtggaacacacaaatcaatcaatctacgagtacaaatagacaagattgcattgcctatataactcaaaagagtaaagttgatgaatctttaatagcagagacaacttactatctgcaaatctaagaacaggagctacaataacagacaaacggccttctttaggactagcaaatctcaagtcaatctcggtgccaccaagatcagcgatcgatacaggtacctaaatttgatacaacaatgaaaagaatctcaaagtatgactaaaaaccatagaaacgaagaaacaagagccaagggacaaaacctcattccaatcttgaggaaccgaaaaggcgtaagggataataggactccaaccaacaccatgccctcctgacttctcgtctggtctacggtatgttctccaacctgtctgagcattacaattacattacaccaacaaattcccaactactatactgtcataatacaactccaagaatcaatgtccaaagcctaaagatttatgaatctatgatccaatagtaacattctcaagaagaagaaagagtgtacgaataaagctacagagtaagagcaagacaagaagaagaggaatcaagaacagagtgaaacgaaccttcttcatcaggttcggacagaccaggaactctcccagcgagaagaccttgtttaacgacagccaatccttcccttggaaatgctaaagccgtcgtcgaggagaccaaccctgacgccattaccgatcttctactcaaaaccctagcacaccactcgtcttcgcatcctcccggactcgttttcggaatctcactattacttctttgatgagcagagattttcttgtgaccggaaaagttgacgcagtaccggagcagagctgtttccatcattctccggcgaagttcgagaattgtgatgtgtttgtttgttgatcaacagattcgtggctctcacctcttttgtgatggatactaaccattttgctagcctcacacgtgtcaatgtcacttactgtaaataaatcacataataagttcgatagagttgattgacaaaaaaaaaaaaaaaaaaaaaaagttcgatagagttttcagttttgattatattattggttaatgctgattaattcaaaagtagagttttggttaatataaatctaaaataatcttaaaaaatgcatattgaatttttttctgtcattataagaatgcatattgaattacaaggaaataaataaaataaactagaatattgaatgtacagaattaataaaccatagtatgtattttgcaaaataagtaggatatcaagtcaatatttgtttttggtttaaccatatatattggattatgagaaaagtaatagtaaatgaatatcttagaatattgactgtacaaaattgataaagcgtatactgtatgtatttccttcatatatatatttgtgtgtatgattcatcctcaaacattcactccgagaaaagaactgaaactaaatcaaaattaagatccatcgaagtgaaatggcttctaccaaatatttggtccttctcttcatctgcctcagcgttcttctaaccccaggtctaaattctctaaactcatctttctgttttttattttcgctaatacaattcatagttcagtcgtttattatcatgatttcctttacgtgtttttatctttaataaacaattccaggtccaaacttaaattaatttctgaaatctatgagtgatttaagtttatatatatatcactcaagagatctaattattccaaaatagtatataaagagttttacaatataattgtttgggtgacgtcttaagttgataatggtatagttacatgtatatacatgctatcgatattttatttgttctctcaattaagtattctcttttttatttgacattttttttttttttttttgacaatctcaattaagccttctataaaatctcctctatatatttgtttgaacaggattaggaacagaccctgtgcctaccccgcctggactacatattccttgtggcaaaggtttcactagcaaagaatgcaataaatattgtacgggtgtaggttaccggagaggttattgtgcacccgacgaagaatacccacaaataagctcgtgttactgcaagtggcggatctaaagaaaaaaattgtttggggcactaatccatatgtagataataattctctttttttgcagtaataaaaaatatcgaaaaataataatatgtaaaacaattgcaattagagggcatcgaactatacttactagacacaatattgagcgctacttctatatgagctaagatatttatactgatccattgttaataactcttatcaatgagtattcttatctagtatgagacgttggatgtgtattgttcgtcgtctgtttaattttaataaattttacataatcccatttcgtaatctcttttattttatttatattattattataagctcattatattaaagtagatgaaacttgctttgctgcgcaatttggtgtggtcttcaaaaccttcaaaagatgacgaggcccatttatatccgggccttagggtgtttggcatgatttgggctaggatttaagaacccatttgttttgcgtacaagatgatttatagatacaaatgaaaatacagagcaagacaataagaagaggaatcaagaacagagtgaaacgaaccttcatcatcaggttcggacagaccaggaactctcccggcaagaagaccttttttcacgacagccaatctttcccctggaaacactaaagtctaaagccgtggacgagactaaccgatttttgtggctgatacgcatgcctcttaacttcttttgtgatttgtggctaatcattttctagcctcacacgtgtcaatgtcacttactaggagtctacagaacgaataaaattcatattacagattttgccccaaaacaattcatattacatacagatagtagtctcttctgccttaaggttatgtgcatttacgttcaagaatatacaaatctatctttgttgcaggattgtgaagttgtgtattgaaatatgcgatcacatcctgtatctgagtttttgacgtacttcccactaactctgcaatcccatcaagtctaattcctttattcattgtcactttcccaacagttaaagcaagattcacaacaacatgcttagctttttctggtggtataacactcttctgtttatgcttgaaaccacttcgatggccgtgtatcttatagcaggtgtcagcgttgtgtccagtgtagccgcaatgagaacattgaacttttggctttgaattagcaggaaataacctggtcgcattcacggcaaactgatcattatgtgaaaccgaaatgttgaatgtggaagcattggttggtactgtgacaatgttgcattgactgtgataaaaaggttgtaaatctctgccaggtccgaatagttgagtaagaatcattcaggcctgagagaaacttaaaaatcttggcatgcttggcaacagagtaagtagcagtacaacatttgcaattttggcaagtattgacacaactagctccatccaagtcatcccacagattcttcaatgcggtgtagtgcacttcgacctaaggacttggttgtcgaattggaatttcccgtcccaatccagaggaatcttgaagcacacgtaaccgcctcgagggcacttcaacctaaggacttgaaaaaagtcaaccgtggcgtgacaaagaagcatgccgtcgatccggtggtatgcgcacctttaccagaaacaaatattcaatttttagtaacgagaaagttatatatcctaattaaataaaaggattttgtttttacattaacctgctaagaagcacaaggtctcggtttgtaagaccttgctctctgaactttgctttcaaagttgcgatagagtcttgagcgtctggcaacttctcagcgttttttacattcgagatccgaccatcgtttcggcctgtcggaacctcgtagaaggatcctttcgcctattgtatacaaatttgatgttagataacccgtcaatgtacgtataataaagaacattgagcattttttaaaattatatttgtggggtatattactgttataatggcgtctctggcagctatagcgatgatgtccgcacacgacacaacatcggggcaagaccgctcaacggcagattttaccttgcctataatgttgaagcctccaacgccggctaagaacctactgaggtaatttggaaagtaagacagtggagcaagcccgtgaaactgaataacatttccacaatttttgcttatattttgcttatattttgcttatgttttgcatagattttaccttaagttgacatgtctaaccaaagcaacctacctttgaagttagcacaatatcatcattttgttgatccagcttacaaagaattgtgtgtgaccattaattttgataacaaatacttatataataactttctatttacagaaatatttgaaaaatcactatatttttatttggaaacatcttgataagaaacaaactaggatttattcaaatcttttttattttccgattccaatatggtgggattgaatatctaatagattaatagacgtatatgcaatgctacaataattggtataaatatatcttttcataattcaaatttgtttattttgttaaaccaacaaactcaaattgttatacttaactatgtatgagatcttggaaactagtttgtagcactgcataaacgtctaatctctccttcagcaccgattttcactccgatagcacccatctttatcatggctttagtgaaatccgcagcaaaattagcctttgaactttgattagtttctaagtatgaatcaatgattttcttcatattattgtcttggtataaaacagagtccgatagaatgacacctctgccatttttgatgttttggaagatttggttatcaaacacaaattggctatcccagtccaacggaatcctgacattaacatcaccgccttggggacactttgacctcaggatttgaaaaaattccgggtttatcgtaggatcttgagcatctaaacgtggtatgacaaagaagcaagccgttgtaccaatagtatgtgcacctttaacaaaaataaaattcgagtaagcaagatagtgttttttttgtcttttcaaaatagtatttaatcaagttgttgagattatgataaataccagcactaagaagtacaagatcttgatctgaaagccctttttctctaaattttgatttcaaagtatttatggaatcttgaacatctggcaagttcttagcatgatcaacatttgcaatcagaccgtctctccgaccggttggaacttcataaaatggtccttttgcctaataagttaatatttaatatcaaaggatcttatttaacccaacacatatacatcgtacgtgtattaaaaaaaaagttctataaagaagtattaaagtgttacctcagcaatagcgtctctagcagcaagagcaacgatgtcagcgcaagacacaacgcccggacaaaaacgttcaagctctgatttggcttcgtctataacatcgaaaccagccacccccgcgttacccgcagcaaacctttcgtcatcgttcccaccatgcttgattagtattgacccatcacaaccctacaacatacaaccaaaccaatttatgtcactagctagttataaaaaaagagattttacttcgttttttttgctttgcattggacctcgacaaagcaatcgtggaactggagacggagtaagacagcagccttccctgggtcgttggtcaccgcctgttgaacaacatcacgaacgattgactctgctgatggacatgtttccgagtagaatccaaactgaagttgtgccgctgaataacctaattgatcatgaaaatataacaaaactagaaataatgcaatagtgatcattttgggatcaaacaaacgaattgatatatcttctcgtattctacggctcatttttgatgattgtttaagataagttgcaaagtttttatatatgctcggattatatttatatgcaattatgcatatagaggaggtgtatatgtccttcatatttttgaccttatgtcatttattgcatatagctgttaccgcgtaaaatcatccgaaaggtgacaatcccatctgttaatttttgtcaaaaggattcttgtacatataaaacaaaaacacaaaaaataatattcaatgaagtaaatttcttccattttatattttcaaataattgagttcttattccaccagaagctatgagaatgaatgataaatctacttatttcaaaaacaaacaaaatctacgttttgccaattaatcaataattaagaaagaaaaaaacgctaaatataggcctatctcgtcaaaaggtatgtataatcaatctatagtaacgtggcgaatattaaagttaagtaaactgcatgtggcaacaacttaaagagatatatattgaaatccttcgtaacgtcttttgttttctctgcaaaatgtcaaagtgagtatcacaacaacacaaccaaatgactgcaaatggcaacaaacttgaggaggtacgttcggtgaatgtggaagaatcccactgagacagaaggtttcagtaaacaaaagtaattaggacttagctacttagctctttttcacgtgaggagcacgtgttaaatcggtttgttcgttataacagcccaggggtatatctgtaatctcggtatctcggtatcgtattatttcttaaaatgttttatacaaaacagaggagtgagactgagatttaggcaattagctaatgtttacggatttagcccaaaaaaataaaaagctaatgttacggtttctcttctaaatgcgttaatatagtcagaaaaattctatatctaagtattatccaaaattggttagatttttgaacaaaatatttatttgttacaatgtatatatgttatattctacctgtaacaaaacaattgatggagatcttttgaaagattgggcccagcaaatatttccttgcaaagggcttaaacctgaatttaggaactggatttagaataatactccagttgtctatacacaataaaaagacccgtttaagataatgaagatcgtaatacttaaaaaacgcaaaagacataatgtttcatgcagatttgaagtatatgcttaagttaagtggatcaagaaaacttagaaactatttttcaaatagcattgcaacaacaaaagacctgatacttctacgtatgacgtatctatatatctatcatatgcacatgtacattgacaagacggaataatgtaaccatgtttgtaacgaaaaatacagaaagaagttgaggggaaatgaggtaaagtagaacaaaaaataagaaacgaacaaaatgatgaattgatggcacgcgaagagaagggagttagaaagatgcaaacacttatgttatgtcactttcctttgatattcacactccaacctctctatctctccaatgactagaccagacacatttttagttcttgcccccttttctcagaccattttctcactcactttccaatttttccctttttaaaaaaaatcctaaaatttatagtgtgtaatatagaattttgaaatgaaaccatcatttttcgcacttgaatttgatttgattttctaacctaccaataatctcacttctattcatattttttcccctttcctcgatcccatgcgcttcctcttagtcttcattctcatcatcataccttcttttttccatctttttcctcagttttttgttcttttttagataaatatttccaaaatattagtgaagacctcgttaataatgtttaaaccatagtgttttcatatgtatatgcgtgtgtatactttggtggtaacgtaaagagacgaggtgacataacattacgatatagaatgataaagacagcttcgctagtcgtcgagaaacaaacaaacttgcttatcctgaattgttttagtcagattcatgtgtgtactaatatatacagacaatataggttacatgaggctttgatgccattacccatcggggaaaataatcataactataagtgattatatatattatcctacataactcttgtctgcacattttggttagaaagtagggttacttaatatttatcttaggttagatatataggacggaatcaataatcccaaacttttttgtagcctttcgttgacaaagtaaattatttattttataagaaaaaggttacgtatgacttagttcttgcaattgccaaaaggctaaaggctaaaggcttttaagcttgagagtaaaaggctaacactgtaagtctccacccatttcgccgatatcattgatcttagattctatgaggatctcctttcactttctttatgtatatatgtacaatttctgtatatctatgtgaataaattaagaacaaggtaatcatgtctctgtggaccctttgcttaattgtgacatatgtattgttagtacaagaagctcattacattccttttatatggtcagaagttccaaacattttctagtttcagatatgttagctttccatattttaagaaaattagtaaacctgactctacttcattattgattgttttaatttgttttttgaataattgataactggttcttttatatgttaaaagacgaatttcatgatattgttcttgagcatagcgagacgaggtatataatggtgggaagatacatcaaaagagttgcatgagacaaaaacaaaatggaaattgtcatgtcattaatgactgaccaatttccgtagctttaactagaaagcttcaaatttgaagtatatactttatcttcatttttcgtgcatgtatttctagtagattttgaattgaatagtcatatagcttttcgtcataaaacacaccagaaataagaagtttaataatcaataaaagaaaacaaaagagttagggggataatttgggtgaaagcctatttcgacaagacaccaagtgtgatagttttggataaacagatattttttatccgagtttgctgcaactgtatgcaaaaagtgtaaaatactgcaaaagtagatatacacttgctaaaagtgaaaatactgtaaaagtaaaaataagagaaaagaaaacaaaagagttaggtcaataataagggtgcaaagctcacttaagcaaaacacagaattttcaattttgggtaaacaaagtgtacttttttcttgaattacgaaattttgtttattatatagatttctgaaataagagacttatgcgtgtacatattgagaatgattatacgggttacaaagcaaatctattgcatgaagttattctaaatattctattaaaatctttttcccggtttggattagattttcaataatttaattatgaagttgaattaaaaaaaaaaaagagtaacaaatcaacttattaattaattttaaaattgtgatgagtctatttaatgagaattttagagattaaaataatgatgaggtccagaaaaagaaagtgctttatatatagatttccaactatatatgtatagcagcagtattttaccaatctatataataatcactaatccctccctaatgcaatttcataacgaagctaactaaggggtaatctcgtcaacaagtctctatataacccaacacacaaacatttggcacataacttaacctacatagtacataccaagaagaagaagaggcaaagaaaaagatgataacgggaaacgaattctacacggtgatgtgtgccatggcaccactctacttcgccatgttcgtggcttatggatcggtaaagtggtgcaagatcttcacgccggcgcaatgttccggaatcaaccgttttgtctccgttttcgccgtcccagtcctctctttccacttcatctcacaaaacaacccttacaaaatggacacaatgttcatcctcgccgacactttgtccaaaatcttcgtcttcgttttgctctctctatgggccgttttcttcaaagccggtggtctcgattggctcatcactctattctcaatcgctactctccctaacactctcgttatgggcatacctttgcttcaggccatgtatggagattacactcaaaccctcatggtccaactcgttgttcttcaatgcatcatttggtacgttatcaaattactatccgttctttattcatttaccctgtgattgattagaaaacctcataataatggaattattttgtgatttcacatatttttaccacacattttttcatggattttgtaaccaaaacttaaatgaatttcgttactctaggatataattcaaccaaatcaaatgtttttactaacccaagcttcttattagttgaattatttaattataacgtatgataatataagctaagtgtatatacatgtataggtatactctgctactattcctctttgaactccgagcagcgaggttgcttatccgagcagagtttccgggtcaagcagccggatcaatcgccaagatccaagtcgacgatgacgtcatttccttagacggcatggatccgctccgtacagaaactgaaaccgatgttaacggtcggatcaggctcaggatccgacggtccgtatcatccgtacctgattctgttatgtcctcctccttgtgcttaacccctagagcctctaatctttctaacgccgagattttctccgtcaacactcctaataaccgtttcttccacggcggaggaggaagcggtacccttcagttttataacggtagtaacgagatcatgttttgtaacggagatttaggcgggttcggatttactcgacccggattaggtgcaagtcctagaaggctctcgggttatgcttcctccgatgcttactcgttgcagccaacaccacgtgcctcgaactttaacgagcttgacgttaacggaaacggtacgccggtttggatgaaatctcctgccgccgggagaatataccggcaatcttcgccgaagatgatgtgggagtctgggcaaagacatgcagccaaagatatcaatggtacgttttctttgaaagatgtgtcgttttcgtttttcgttagcactgacacgacggcgtttagtcaattttcttctcttttcgtgtttttctttatcattggttcttttaaaagatttaatgaatagaaaaacattgatagactacataaaatgcagcttttcagaaataaaaaaacttagcattgtctcttttactttccaaatccctaggaattaactaattagaaattcaatctaattttataaaatttataagtaatagtcactaaatcccacttattttatttttttgtgtggaaacttttgaattttgatacttcatgtttttgagcttaagattctataggacaacatgatgaagcatgtaaacaaagcggacccctcataccacccacacacttactatcatcaataaaatcaccaaaatggtcaacatgatgttgacttttttgtttctcatgatgtttttggactcatcaaattaatgtccattctaaagaatttatttgggagattctatcattttcctctagctcacgtgtgtaatcatcagcgaaaccgacgcatggttttctatttttttcttccattactaaatccacaacctttattaacaaaaagagttataactaattagttgctttcaaaatatcaagttttgtcctaactatcactctgtatctgctcacgtgtattttatataactaaggatcagtgccagagaaggagattagcttcagagacgcacttaaggctgcaccacaggctacggcagccggtggtggtgcttccatggaggaaggagccgccggaaaagacacaactccggtggctgcgattggcaagcaagaaatgccaagtgcaattgtaatgatgcgcctcatactaacagtcgtgggccgcaagctttctcgaaaccctaacacttattccagcctcttaggtcttgtctggtcacttatatccttcaagtgagtcaaaaaataactcaaatatcaaaatttcaactataatcattgaatttgtttgttatataactttaactcatattttattttgctaaataatgagcagatggaatataccgatgccaaatatagtggatttctcgataaagatcatttcagatgcaggtcttgggatggctatgtttagtttaggtatgaacatgttcttataaacctgcataataaataaaattatgtataacgtattctaacaaaattaaactataggcctgtttatggcgctgcagccaaagatgatcccttgtggggcgaaaaaggcaacaatggggatgttgatcaggttcatctcaggtcctcttttcatggctggtgcttcccttcttgtcggattaagaggttctaggttacatgctgctatcgtacaggtaaactattcagagtttaccttgatttggcccatatatattattgttggaaaattaaagaaaacatacttggtgatggagaaagtgtttaagattttgggagtgaattaggaagtttaacatatagaagggactaattagttaaaaaaaaatgaaggatagatatgttcatagctttcaaaagtacaaatatctatctcatataaacctaatatagtctaccattatatctagacttatatgttacaaagtatctagatattatgaaaatatctagatattttacatgatgcaattctcctgtattagtctaaggaggtattaatattttaagatggttctaaagagactctttaacttgtttcaagttttgcgtttggtccaagaaattaatgatacctggatcattgacacataattataactaatccaaaatcaagttaaatatttcaaaatataaattacccgtggctataatttaaacttcgtttcttataaaagttttcgattaacttatagtagagatatgtacatctaaatttgatgaagccgatatgttcttttaggctgctctaccgcaagggatagtaccatttgtgtttgcgagggagtacaatttgcatccagacctactcagtacattgtgagtctcttgctcttctttttgttgttcttcatttacatttacggttgaacgtttcaaaatgcggtattatggtttatgtgaaatctctgttcttggtgattttttgttttgttttcagggttatctttgggatgatagtatctttaccagtaactattttgtactacgtcctcttgggcctatgattcacacaacacactgaagaaaaagattacaccggagaaattaaatgatctatgaataaagaggtctggaaatagagaaatgtgagctcttaagagttgttcttgaggagcttgtgagaaagattaattaacggttaattacattgttgaatcaaattactggtaaatggttaggtgaataatttaattttatgtatttgatatccaacattgatcgacgtacgtacgtagtgaggtagaggcttaggttaggaatcaatcgtgaatactatttcaacgttgattcccgcgagctgaatattttttgtgatgtatagtaaaacgcatatgattataggaatcatcataaagattcttgtcatgaagaacaatattaaaccaaattatgcattacgagcaaaataattatacaaaaatactgataattataacttgggtcattgtattttctgtgtaatgtctactatcccttaattagtcggtttaaatcaggaaaaagtataattaatgacactcataattgtatcgttaagacttgaaagtgacggccaagaatacaattaagagccaattagtgatctttcataactttaaaaatctcacaaaagtagaaaaaaaaaattccaacttgatgaccaagaataatactattaaagagctatttaagatgaaaccgcccgaaaccaaaagcattcgatgggtacaccgattactgcttttagcaacaccacggcgtgaccatcaagactaattaactaagaccacattttaaaaaaactattaataattactacaatttgtaattaaaaagatcaacgagaaatgccacgtggacgaatactagcaacgccaagtggaaagagcgttcgagagaacaaggcaaaaccaaatacgcccctagtattctacagatgtcgactggataattacaaaagatttcaataaacagtactaattaatttctagtggtgagtttttgtaaatatctacttcttccaattaccagctgctatataaatccccttctctgtttctcttttcttacatcacaatcacacaaaactaacaaaagatcaaaagcaagttcttcactgttgataatgtctaccaccggacagattattcgatgcaaaggttttctttttattctgtctttttccaaatatttattgatcggttacatttctgttgaggtttttgttatgaatccacaatttctatgttgaattaacaaaacctgtgtcgtttttttgtggtggttgcagctgctgtggcatgggaagccggaaagccactggtgatcgaggaagtggaggttgctccaccgcagaaacacgaagttcgtatcaagattctcttcacttctctctgtcacaccgatgtttacttctgggaagctaaggtagagtaatcaatttattacactccaaattcataatcaagttctaatttttttagaattctaattttttatctaaaaaaattcaacctttttgattccacagggacaaacaccgttgtttccacgtatcttcggccatgaagctggagggtaatagaaacactaatcttctttgcttcgttttggatatttttaaggttttagagattcaaggtcgttttttttgttgttgtgtaggattgttgagagtgttggagaaggagtgactgatcttcagccaggagatcatgtgttgccgatctttaccggagaatgtggggagtgtcgtcattgccactcggaggaatcaaacatgtgtgatcttctcaggatcaacaccgagcgaggagggatgattcacgatggtgaatcaagattctccattaatggcaaaccaatttaccatttccttgggacttccacgttcagtgagtacacagtggttcactctggtcaggttgctaagatcaatccggatgctcctcttgacaaggtctgtattgtcagttgtggtttgtctactgggttaggagcaactttgaatgtggctaaacccaagaaaggtcaaagtgttgccatttttggtcttggtgctgttggtttaggcgctgcagaaggtgctagaatcgctggtgcttctaggatcatcggtgttgattttaactctaaaagattcgaccaaggtattcaaaaagatgatagtctgtttttgactatgttcttctataatctcccttcacttacattgaatttgatatgttattggcagctaaggaattcggtgtgaccgagtgtgtgaacccgaaagaccatgacaagccaattcaacaggtgatcgctgagatgacggatggtggggtggacaggagtgtggaatgcaccggaagcgttcaggccatgattcaagcatttgaatgtgtccacgatgtaatcctcccttcacatcattcggaccaaaacttttgtaactacattgtgggtatctgaacttatcacatatgatgttgtttcagggctggggtgttgcagtgctggtgggtgtgccaagcaaagacgatgccttcaagactcatccgatgaatttcttgaatgagaggactcttaagggtactttcttcgggaactacaaacccaaaactgacattcccggggttgtggaaaagtacatgaacaaggtaatgagaagctttgatatcttatgatgccaactttgaatatatatcaatgttctgatgatttttatgacataggagctggagcttgagaaattcatcactcacacagtgccattctcggaaatcaacaaggcctttgattacatgctgaagggagagagtattcgttgcatcatcaccatgggtgcttgaagccattctctcgcagatgatgttcactttgtgttttacttcctttatgcattcacagcaataaaagaaagaaatctccatcgcttttggttttcttctctgtcttaagttagtcgttttcgtgtctaatctattacttatcattgtaatagactcttcttctattgagatttgaatataaactaaaacacattccattttactgtgttctcaacattcagaatgcaaacggactaaccgtagtgactcgaaagccgtttcgagtcgccattctctttgcttcttgctcaaaggtcttcctttgccggccttttctcggtttactcttatatctgctatgccccaaatgcagattttagcttccacatcgaaagaaaccagcctgaaaataccatcaccttcggtctcagtgtcctcgttagtgtacctcacgtacatcggtctatccttataccgatcaagatctgcggaattc

SEQ ID NO: 139 - DNA, 83822 bp, Arabidopsis thaliana
aagcttcttattagttgaattatttaattataacgtatgataatataagctaagtgtatatacatgtataggtatactctgctactattcctctttgaactccgagcagcgaggttgcttatccgagcagagtttccgggtcaagcagccggatcaatcgccaagatccaagtcgacgatgacgtcatttccttagacggcatggatccgctccgtacagaaactgaaaccgatgttaacggtcggatcaggctcaggatccgacggtccgtatcatccgtacctgattctgttatgtcctcctccttgtgcttaacccctagagcctctaatctttctaacgccgagattttctccgtcaacactcctaataaccgtttcttccacggcggaggaggaagcggtacccttcagttttataacggtagtaacgagatcatgttttgtaacggagatttaggcgggttcggatttactcgacccggattaggtgcaagtcctagaaggctctcgggttatgcttcctccgatgcttactcgttgcagccaacaccacgtgcctcgaactttaacgagcttgacgttaacggaaacggtacgccggtttggatgaaatctcctgccgccgggagaatataccggcaatcttcgccgaagatgatgtgggagtctgggcaaagacatgcagccaaagatatcaatggtacgttttctttgaaagatgtgtcgttttcgtttttcgttagcactgacacgacggcgtttagtcaattttcttctcttttcgtgtttttctttatcattggttcttttaaaagatttaatgaatagaaaaacattgatagactacataaaatgcagcttttcagaaataaaaaaacttagcattgtctcttttactttccaaatccctaggaattaactaattagaaattcaatctaattttataaaatttataagtaatagtcactaaatcccacttattttatttttttgtgtggaaacttttgaattttgatacttcatgtttttgagcttaagattctataggacaacatgatgaagcatgtaaacaaagcggacccctcataccacccacacacttactatcatcaataaaatcaccaaaatggtcaacatgatgttgacttttttgtttctcatgatgtttttggactcatcaaattaatgtccattctaaagaatttatttgggagattctatcattttcctctagctcacgtgtgtaatcatcagcgaaaccgacgcatggttttctatttttttcttccattactaaatccacaacctttattaacaaaaagagttataactaattagttgctttcaaaatatcaagttttgtcctaactatcactctgtatctgctcacgtgtattttatataactaaggatcagtgccagagaaggagattagcttcagagacgcacttaaggctgcaccacaggctacggcagccggtggtggtgcttccatggaggaaggagccgccggaaaagacacaactccggtggctgcgattggcaagcaagaaatgccaagtgcaattgtaatgatgcgcctcatactaacagtcgtgggccgcaagctttctcgaaaccctaacacttattccagcctcttaggtcttgtctggtcacttatatccttcaagtgagtcaaaaaataactcaaatatcaaaatttcaactataatcattgaatttgtttgttatataactttaactcatattttattttgctaaataatgagcagatggaatataccgatgccaaatatagtggatttctcgataaagatcatttcagatgcaggtcttgggatggctatgtttagtttaggtatgaacatgttcttataaacctgcataataaataaaattatgtataacgtattctaacaaaattaaactataggcctgtttatggcgctgcagccaaagatgatcccttgtggggcgaaaaaggcaacaatggggatgttgatcaggttcatctcaggtcctcttttcatggctggtgcttcccttcttgtcggattaagaggttctaggttacatgctgctatcgtacaggtaaactattcagagtttaccttgatttggcccatatatattattgttggaaaattaaagaaaacatacttggtgatggagaaagtgtttaagattttgggagtgaattaggaagtttaacatatagaagggactaattagttaaaaaaaaatgaaggatagatatgttcatagctttcaaaagtacaaatatctatctcatataaacctaatatagtctaccattatatctagacttatatgttacaaagtatctagatattatgaaaatatctagatattttacatgatgcaattctcctgtattagtctaaggaggtattaatattttaagatggttctaaagagactctttaacttgtttcaagttttgcgtttggtccaagaaattaatgatacctggatcattgacacataattataactaatccaaaatcaagttaaatatttcaaaatataaattacccgtggctataatttaaacttcgtttcttataaaagttttcgattaacttatagtagagatatgtacatctaaatttgatgaagccgatatgttcttttaggctgctctaccgcaagggatagtaccatttgtgtttgcgagggagtacaatttgcatccagacctactcagtacattgtgagtctcttgctcttctttttgttgttcttcatttacatttacggttgaacgtttcaaaatgcggtattatggtttatgtgaaatctctgttcttggtgattttttgttttgttttcagggttatctttgggatgatagtatctttaccagtaactattttgtactacgtcctcttgggcctatgattcacacaacacactgaagaaaaagattacaccggagaaattaaatgatctatgaataaagaggtctggaaatagagaaatgtgagctcttaagagttgttcttgaggagcttgtgagaaagattaattaacggttaattacattgttgaatcaaattactggtaaatggttaggtgaataatttaattttatgtatttgatatccaacattgatcgacgtacgtacgtagtgaggtagaggcttaggttaggaatcaatcgtgaatactatttcaacgttgattcccgcgagctgaatattttttgtgatgtatagtaaaacgcatatgattataggaatcatcataaagattcttgtcatgaagaacaatattaaaccaaattatgcattacgagcaaaataattatacaaaaatactgataattataacttgggtcattgtattttctgtgtaatgtctactatcccttaattagtcggtttaaatcaggaaaaagtataattaatgacactcataattgtatcgttaagacttgaaagtgacggccaagaatacaattaagagccaattagtgatctttcataactttaaaaatctcacaaaagtagaaaaaaaaaattccaacttgatgaccaagaataatactattaaagagctatttaagatgaaaccgcccgaaaccaaaagcattcgatgggtacaccgattactgcttttagcaacaccacggcgtgaccatcaagactaattaactaagaccacattttaaaaaaactattaataattactacaatttgtaattaaaaagatcaacgagaaatgccacgtggacgaatactagcaacgccaagtggaaagagcgttcgagagaacaaggcaaaaccaaatacgcccctagtattctacagatgtcgactggataattacaaaagatttcaataaacagtactaattaatttctagtggtgagtttttgtaaatatctacttcttccaattaccagctgctatataaatccccttctctgtttctcttttcttacatcacaatcacacaaaactaacaaaagatcaaaagcaagttcttcactgttgataatgtctaccaccggacagattattcgatgcaaaggttttctttttattctgtctttttccaaatatttattgatcggttacatttctgttgaggtttttgttatgaatccacaatttctatgttgaattaacaaaacctgtgtcgtttttttgtggtggttgcagctgctgtggcatgggaagccggaaagccactggtgatcgaggaagtggaggttgctccaccgcagaaacacgaagttcgtatcaagattctcttcacttctctctgtcacaccgatgtttacttctgggaagctaaggtagagtaatcaatttattacactccaaattcataatcaagttctaatttttttagaattctaattttttatctaaaaaaattcaacctttttgattccacagggacaaacaccgttgtttccacgtatcttcggccatgaagctggagggtaatagaaacactaatcttctttgcttcgttttggatatttttaaggttttagagattcaaggtcgttttttttgttgttgtgtaggattgttgagagtgttggagaaggagtgactgatcttcagccaggagatcatgtgttgccgatctttaccggagaatgtggggagtgtcgtcattgccactcggaggaatcaaacatgtgtgatcttctcaggatcaacaccgagcgaggagggatgattcacgatggtgaatcaagattctccattaatggcaaaccaatttaccatttccttgggacttccacgttcagtgagtacacagtggttcactctggtcaggttgctaagatcaatccggatgctcctcttgacaaggtctgtattgtcagttgtggtttgtctactgggttaggagcaactttgaatgtggctaaacccaagaaaggtcaaagtgttgccatttttggtcttggtgctgttggtttaggcgctgcagaaggtgctagaatcgctggtgcttctaggatcatcggtgttgattttaactctaaaagattcgaccaaggtattcaaaaagatgatagtctgtttttgactatgttcttctataatctcccttcacttacattgaatttgatatgttattggcagctaaggaattcggtgtgaccgagtgtgtgaacccgaaagaccatgacaagccaattcaacaggtgatcgctgagatgacggatggtggggtggacaggagtgtggaatgcaccggaagcgttcaggccatgattcaagcatttgaatgtgtccacgatgtaatcctcccttcacatcattcggaccaaaacttttgtaactacattgtgggtatctgaacttatcacatatgatgttgtttcagggctggggtgttgcagtgctggtgggtgtgccaagcaaagacgatgccttcaagactcatccgatgaatttcttgaatgagaggactcttaagggtactttcttcgggaactacaaacccaaaactgacattcccggggttgtggaaaagtacatgaacaaggtaatgagaagctttgatatcttatgatgccaactttgaatatatatcaatgttctgatgatttttatgacataggagctggagcttgagaaattcatcactcacacagtgccattctcggaaatcaacaaggcctttgattacatgctgaagggagagagtattcgttgcatcatcaccatgggtgcttgaagccattctctcgcagatgatgttcactttgtgttttacttcctttatgcattcacagcaataaaagaaagaaatctccatcgcttttggttttcttctctgtcttaagttagtcgttttcgtgtctaatctattacttatcattgtaatagactcttcttctattgagatttgaatataaactaaaacacattccattttactgtgttctcaacattcagaatgcaaacggactaaccgtagtgactcgaaagccgtttcgagtcgccattctctttgcttcttgctcaaaggtcttcctttgccggccttttctcggtttactcttatatctgctatgccccaaatgcagattttagcttccacatcgaaagaaaccagcctgaaaataccatcaccttcggtctcagtgtcctcgttagtgtacctcacgtacatcggtctatccttataccgatcaagatcctgcggaattcgtactaccctttcgacaccaggagatgaaacctgtacacaaaggttcaatctttgttgagtcaatgaaccaaaatccacaggaataataaaaggctaactaattaactaacctctagagagatattgtccggtattgacttggcgagttctgcttcagccaattttgctcggtagattgttgaaaatgcttcaatgtcttccattgttggtgaaccaaacttgttagtgagccgctcgattctcacttgtatggttgaatttggcagagtcttgaaggcataaatgcctaaatcaccatcaaaagactcacaaactttcacagctaatgctaatgctactttgtcccataatgttccagcaagtttgatgcctcctccaccaccaccatctccagccttcagagagaattaatccatagatgagagaatgcaaaatgttttatctttccaaatctctcaaatttaagttatttaacataagtagacttacatagagctcctcctcgctctcatcgaactcaaagtcatcgtcatcgtcttcgtcatattcatcatccagtagcaactctgtagaaccaaacatcaccagaaaagtggttgaattcaaactcaagctgcagagaattatcagattacattcaaacaaacaaaaagggaaccaaaacacaccgtcttgattctcttgaatctcttcgggaagaactatctcctcttcttcttcttcttcttcttcttcttcaatgatcaactcttcgactttattcggtttcggttcgaaagtactcgttttattcttcctcttcgcgtgagttttgaaggtaaagtttggagtccgacgaaacggcgtcgccggaaatccaaaacgaagactcgtcgtcgaacggaaacgattgacggcggaaagattgcttatgctaaaagcaggcaaaactgaaattccccgacaagtctgattcggtcggaaacagaacaacaaatccatcttctccggcaagtgaagaagaagaagagacgttctctggatttactatgccatcttttggaatggaatgcggctaaaaaactatggttctcctcactaaaatcaattttatcggttcggttcggttccggttctcaaggataaataaagttgacttttatgtccaacggaataacaaaagccctctagttttaaaatttgaatgcaaagcttcatcttcctgtaaattctttatttgtctttcattcctttatcccctcatgattacattgtttctgggattcgtatacaggtttcaagctgataataaaaaaacaaaagaacatatccaacccacatttggttggcgaaaggcagagtaatttgtaccaaaccagaaagccaaaagaattcacagggaagggagagcggttttatgcggcggtgatgaagtggtggtggtggaagaattgttggtagagttcgtctcaccccaatgccaaagcatactctcccaaaagcagaaatcttcgaaacaagtcttaagtctcttgtctttgatctttatcttccaatgtccatctttgtagttccctttctctgcttgtctcctatcccattcaagttgcgccttctgtttcgatcttagtagacagaacttatgcaagttttcaggcattgcgtcgtgcactctccaccaggttttatgagcctcgtcactagcaaattcctggaaaatatcgacattccaattgcagtcatagtctctgaagcataaccagggtttgttataacctaggtaatgaagaacgtataggatcggaggatcagctccaaatagactcgtcttcatttttttaatctcaggttcgtctccttcccagaaatgcttcaagaaattcatgtgttttggaatccgatgccaccatgtgaatatctcgttaaggtaaccttggtctcctccgttgtaagacacaacttcattaatgttatccattagtaactggaatgttgaattagatggctcaaccaccattagaccagagttgaagagcgtagcattgtttccagttgctgatatctcagggaactcgaagaggaaatcaatgtttctcaggataagcatgtctgcatcgatgaagatgatcttactgtattcagtcagttgccaaagacgaaacttgctgtagttccattcgttgtaggcatttggtacagcattcgggttcctgattctttgaaacatttgaatcttccatccagcagctaccaagccacttttatggtattcgcttatcgtttcatcaacaagtatgaccagatcacgagtagagcctgacattcgaatgctctgtgcagctgcaatggctccacagacataaaattgggcagaatgcaagatagtcgcgtaagcttctttctttgcacctgcggagtagaaattatctgcagttgaaataaacataatcagcttaggaggggagaactagctgagactgaaaacgaagaaacttgctactaacctttagcttgaagaggaacagaaagttcacaggaaccaacaggaagctgtaacttttgtcttagctggtgaagattaggcttatacagccatatgtttccttgacgggcaacaagttcttgacccgtaaaaagattcggtattggaaagcaatcagataccaaaatcacatgaacattatgaagtcctttagaagaagccgccactcgagctgctgcaagttgtaaatgcaagcgagccacatctctagaccattttcctgatttatcacacggaagcttggcaattacaagatcaatccgaggcttgccaggaatttgaatcaaaggcagagaaggacaagtagggacttcgaattcttcaacttcatcaatccattccgggtataaagattcccatgttatgttctttgcagcataatctagatgcaaagctacatgatcacagtcagatttcgttacctccttgaatcgatcaatctcgttatcgttaagatttataagaccaattccttgatactcgcttctaccaaatacgtgcttctcaacaagatttgacatatggttccagttgatctcagctgtagctacatagcgaggatcagtagtaagaccaaaactagttggaatttcaggaatttgtagcggtggataacgaaaacggtagatcgtgaacaaagctccaagcattatacaaatcaacacaagtttcagagtgttgaacttgacacccttctcaattctttgaaatctcctcctacttgtcttctcactacacacaacaaaacaaacgaatgagtcattatctatgtcaatccaacagatagataaacatagatcgcttgtgaaacacatttctgaatcaaaaacaaaatcgaagatctgatttccagaaaagtcaaccatgtgtgtgaagctactaagttaactaagaatagtacgtagtgttcatgaaactagagaaactaatgaagaataagaagaagaagacgaagactaactttgagaacgagagtcgatgtcttgactccatgggacttgaggaaggtatcatcgtctccgtaagaccagggtcggtttcgagaatttcataatcgcctggtaaacaacaaaagacgagacattttagggatttgggaaggagaaattaatttgattttggaccaaggcacaaaacggtgcgtattaggaaaatgagatttttagaagtccgtgttttgcaaaacgaacctttacttatcaggtatttgttattttaacccctactctaatgtttgaataaattttaaccagaaaacgaaaatcacacacagtagtacggttttacgcggtggaggaagaatcagcagcgacggtggagttggtctgagtctcaccccaatgccaaagcatactctcccagaaacagaaatcttcaaaacaagtcgtaagtctcttatctttgatcttaatcctccaatgtccgtctctgtaattcgctttctcagcttgtctccgatcccactcaagttgcgccttttgtttcgaactcagtagacaaaacctctgcaatttcttaggcatcgcgtcgtgcactctccaccaagttttgtgtgcttcatcgctcgcgaattgatggtatccaacgacattccaattgcaatcgtagtctctgaagcatacccatggtttgttgtaacctaggtaatgaagaacgtagagtatcggaggatcagctccaaatagtctcgtcttagatttcctgtgcttaggtgtgtctccttcccagaaatgcttcaagaaattcatgtgttttggaatccgatgccaccatgtgaatatctcgttaaggtaaccttggtctcctccattgtaggaattgatatcgttgatgtgatccattagtaactggaatgttgaatttgatggttcaatcaccattagaccggagttgaagagcgtaccgtcgtttccagttgtggagatttcggggtactcgaagaggaaatccatgtttctgaggataagcatgtctgcatcaatgaagatgatcttgttgtattctgtcaattcccaaagacggaatttgctgtagttccattggttatatgcatttgcttcagctttcgggtttctgattctttgaaatgtgtgaatcttccatccagctgattccaagccacttctatggtattcactgatcgaatcatcgactagtattaccaaattgcgagtagagcctgacattcgaatgctctgtgctactgcaatggctccacagacaaaagcatcatctgagtgcaagatcgtcgcgtacgcttctttcttggcatttgccgagtagaaattatctgcaattgaatcataatcagcttaggaggagagaatagagatgtcaaatttagctgatacaaaagacgaagaaacttactactgagtcactgacctttagcttgaagaggaacagaaagttcacaggaaccaacaggaagttgtaacttttgtcttaactggtgaagtttaggcttatacagccatatgtttccttgacgggcaacaagttcttgacccgtaaaaagattcggtattggaaagcaatctgataccaaaatcacatgaacatcatgaagcccttcagaagatgccgccactcgagctgctgcaagttgtaagtgcaatctagccacatctcttgaccattttcctgacttgttacatgggagcttggcaatgataagatcgattcgagacttgtcaggaacttgaatccaaggaagagaaggacaagtggggactttgaatttttcttcctcgtcaatccattccgggtataaagatttccaagttatgttacttgcagcatggtctagatgcaaagctatatgctgacagtgagattttatgaccacctgccatcgattaatctcgttatcgttgagatttagaaagccaattccttgatactcgcttctgccagataagtaatgctcaacaacaagtgacatactgttccagttgatctcagatgtagctatatagcgaggatctgtggttacagcaggttctagtatccatttgtttgcaaaacttgatggatcttcaggaatttgcaacggtggagaacagtagagtgtgaacatagcaaccagcatcataagaaacaaaacaagtttcagactagagaagttgacacacatttcaacatcgagagtgtatccgtttctttggaatctcttcgtttttgttttctcactatatatgtaaaacaaatgcactatgtcaagccaacagatgaatacagatctctgtaatgcacatactcaaccacattgctctcatgatctatgatcctatctgattcccctaagttaggtaaagtagtttccattgaactcaagaaactgatgaagtagaagagaaaaagacttacctggaaatgtaaagtcgatgacttgactgacttgacggcgccatgggactttcagaagagagcttcattctcactgtaagaatattaagtttgactttcctgagtgagagactacatgaagctggatgcatcgagcattacaataatcacacgtttttgacgctaatccaaattatattatattagcggacggatcggaacaaaatcaacacgatgggtcaatgttaagtttgaatttttttgcggaaaaatcctgatctattagatgtttcctttgtaaaaccctgatgttttattacttaataaataaaccctcaaattaggttcagttaatcaaaaattaagtttgtgttgaaaagaggaataaccaataaaatatagggtttgttttgcaaaaacacttttcttcgtatgagtcgacgagtctggggaccttttagttttctcgattaaggaaaggaagatctgaaagtgaacgcgaaatcacttcgccagcgttattgttaacaagaatcatcagattagtcgccgtagatctgaatcaacgtcgtaacagtagcagaattttgcggtgaaacgatggttttggttacgtctgtgcgtgattacattaaccggatgcttcaggacatctccggcatgaaggttctcatactcgactccgaaacggtaaagtccgatctcgtcttcttcgattgctaatcttctctgatttgtttctggaatcgtggttcataatttcccttgtaaccggaaacacatcttcgtgattacttgtttattggattaattgttgaatttgcaggttagcaatgtaagcattgtgtattcacagtcagagctgcttcagaaagaagtgtttctggtggagatgatagattcaatatctgtgtcaaaagaatcgatgtcacatctgaaagctgtttatttcatccgtccaacttcagataatattcagaaattacgataccagcttgcgaatcctagatttggagaataccatttatgtatgattttttcatcttctaactatttcgagtttatcattgttcactcacaatatacaaaatttgatgttgtttttgttatgaattctttcagttttctccaatctgttgaaggatactcagattcatattttggctgattccgatgagcaggaagttgtacagcaagttcaggtgatttttagacttccctcatccatgatgtttttgaataggaggctaatgctaaaagaatgtttcatagcctatatgatggatcaatatatgtatagatttttagctgtctctgagaagttgcttggtttgtgatgaaacggccatacttgtggagcttagtatcccccctacctgtctttagttttctgatttaaacttatattgcttggtgcactcggcatagtactgtataatggcttgtttaacatagtctttgtggttttttatattgcaggagtattatgcagactttgtttctggtgatccatatcatttcacattgaatatggcatcaaatcatctatatatgatccccgcagttgtcgatccctctggtttgcaacgcttttccgatcgggttgttgatggaattgcggcagtgtttctggcgttgaaacgaagacctgtcatcagatatcagaggacctctgatactgcaaaaaggattgcacacgaaacagctgtaagtgaagttgtttgacaagctctcgtaaagttatttgttcccgctatattttgcatgcatgtgatggaactaattcccacttgtgtctatccaatagtctgaaaattcgctgtttatgtttcagaaattgatgtatcagcatgaaagcgctctttttgactttagacggactgaaagctctccgttgctacttgtaattgacagaagagatgacccggttaccccattgctgaatcagtggacatatcaggtaacttgactaaacaaaattattgtgctactctatgatataagatgtgcctcccgctgtcttgcttttttgtaagactacgacttactaattaacgagattttctgtaggcaatggtgcacgaactcataggacttcaagataataaagtggacttgaaatccattggaagtcttccaaaagatcagcaagtggttagttttctccaatgccattgttttttagttgagaaccttacagctaatatgtctcttatcctggcaggaggtggttttatcatcagaacaagatgcatttttcaaatctaacatgtatgaaaattttggggatattggaatgaacatcaagcgaatggtagatgactttcagcaggtggccaagagtaaccaaaatatccagacagtaggtacaaatatggctagtcttaaactattctctgcaaaaacttttgtaacaacagattctcgtgctagtgacaattatatatctgtgaattcgttggttgtacagaggatatggccagatttgttgacaactaccctgagtacaaaaagatgcaaggcaacgtttcaaagcatgtaactctggttactgaaatgagcaagctagttgaagcaaggaaactgatgacggtttcacaaacagagcaggacttggcttgcaatggtggccaaggagctgcatatgaggtagtgaatatctgtggtgaacattcacttgtagtcgcatatattaaaaaatagctacaacctgcagaagttcttactgaataatttggcattcaataatttggagtctcatgcgaatgtaatccagtgaacctgcagaagttagcgaaatatgcaaaattgtgcagactctgctgtaagcacggagctctgactctctattcatgcttatttgcaggcagttacggatctcttaaataatgaaagtgtgtctgacatcgaccggctgcgtttggtaatgctatatgctttgcgctatgagaaagaaaatcctgttcagttgatgcaattgttcaacaaattggcttcacggtctcccaagtacaaaccaggggtacagtcagactatcatctgtttcctttcagtttaaattgcatctctttcttgtggctttattattctgcatctcttttaaggttgattttgatctgtccctctgctactactatacttgttaacctatctgcaattccgtccatagtagttttaccttttcgtttttatttttgaataacttgataaaagtaccctcaaatcatgttataactttctggttgccatgcaactgcagctagttcaatttctcttgaaacaagccggtgtggagaagcgcactggtgatctatttggaaacagagatcttttgaatatagcacgtaacatggctcgtggacttaaggtctgtatctgagttaactcgtctccagcaacattctatatctccctatatatatgtcatgttactgacatcttgaaaaatacagggtgttgagaatgtctacactcaacatcagcctcttctgtttcaaacaatggagagcataactagagggagattacgagatgtggattacccatttgttggagatcattttcaacagggacggtatgtgcctctaattttttcaatttcttaaaacaggtaacttgtttgatagttacagatttctgcaattcgtgaaaacttacataactaatcaaaaactgcaaaatttctggataaacaggccacaagaggtggttatttttatggttggtggaacaacatacgaggaatcacgctctgttgctctacagaatgccaccaactccggggttcggtttattctcggcggcaccgcagtgcttaattccaagaggtaatgctgaggttaagacagtgtgtgcaaatgagcctcgattggttttgagttctaggtcgaaacagcactgatcaactaaaatatcaacattggttaagtcatagaaggcccaaaccgaaattgctgtttgaattaaataataactaggaatctaaattggtctacaaagttcatgaaagtgtattataagagaaatgtaagctgaaaagtgaatttggttgtgacagatttctaaaggacttggaagaagcacaaaggatatcaagatcaggtagccatatggtgtgaagaagatccaaaagaattttgtgtaaattattttttaagtcttaagattcttccggggagcacatagaagaaagagacaaatgaaagaagaagattgtggtcaggttcgtcgaatctttcgtatacatgatgatgattaccccaccagagatttaatttttggggtttgtgtgtgtattcatcgtggtacagtttaattggaccgttcttcttacacaattatggctaatcaagaaaatgtaacctgaggaaattttactcctctatcataattgcacaaaacagaattaataatctttttcaaaattataataacactttagacaaaaaccagagagatttcataacaaaaaatctttattactcttaaaaaacaaaatcatatgtggaatttttgaaatattactagtttactactcccttttataataatgaataaaatcacttttataatagtaaattagtaatgagtaaaatctgactgacgtcaatcaaaagtaagtaccgatttgggaaagagaacaatcaaagagaaaacataaaaacagagctcttttgagtatatatggagtatcttatgtagctcggctactgtcgccgttggatttctcaaatgtcgtaatatgatgtgagagcgaagctgacacaactctctgtctctgctctggaagcatttttacttgttgttctttcacacatacacacttcacagaaaccctccattacaacataatagtatatatttactatacattccaaaaaaatcattaggtttacttttacatccaaatttcatacttttaacaaagcgattatgtgcaatttaatcctctatcaagttggattttgaggggttaaaattgtttgaagtcaactagcaaaagtctcattcttgagaaatattcgtcttgcggtaatttttgctatagttttattaaaacgtcaaatcagtaataaaaacaattaaagaattgaggagctcgagaaaagttcttcacatacatctctttctttctgcttagctcttaagcagtctctgactgtccatttcatatcaaattttaaaactattgactatactagatccttctctgtttcttcgatcccttcatctaaattgtctcctctctttatttattatttattcaattcgattacgtatataatttttaagttaactagataatgcataatttcttagttaattagttatctgactttttgaattttgattactgtgtgcttagccgaagtttctagcaaactaccacggatttaaattcgaaagaataaagcgtgacgaaatagataagacaaaaaagaagaaggagagattacttatcaaagtacatatggttgaaagtgatggtttggttattaattaattacagttttaactttagatattttgtctgtggtcttatatatacacctcatcgttcttatcatatgattctgattttagatattcgtaagaaaattaccaattggttacattttcaacaacgaatgcaaatatgcaattcatgctaaattggaaaatttgtcatcccaactttcatgaaaagtcagtgctggagggttttagaggttgagcatttaaatcaaattcttttgatttctgaaagaaaaatttactacaaaaaaaaaggaagtttaactttttaagaaaatattgaatgtttttcactgatctaattatagtgaatctaatatatcacttttacttttcatgaattatgttaatttgtaattttgtatattcagtaacattcatgttacttataaaaaaggttcattatacactattatattatattcaaatcagttttttgtaacgttataaccgttttttttttaaacactctttttttgtcgctaaaaaaacactctacataagagtctctagtactaaaatttcgattattcgactattaaattctgtcgttttagttttcaactcacatgttaattaaactctctatgttgttcttttagaaaatgttgttctacaattcatctaaatctttaggactacaatacatgtcaaccttaaaccaaaatataaccatggtccatatataggagataaacattcaaaatgaataaaaatgtatttatctaattcagcatcttcaaagaagtagtcttcgtatcaaatgtattatccaccataatcaaatagtataatcttaaaccaaaagagctttagtttaccgtctcacttaaatggaaatttgcatcacgacaaaaatacatattatagagtaatccatcggctattgatacaagtagaagatgcaatatagatagcatcagaaaaaaacctgacacaacaagcccaacattttttttaagcaattcaaaaatttcaagaacacccccaaaaaggaataatcatacgaaaaaaacaactccgatgtttttaagttttaagttttaaaaactgataagcaaagaaaaagaaaacgctgcgcatccctctcagcatccctctcagaaaataggaaaacaacacttagttttcggaccactaccacttactgtccaagtcctagcttcacctcttccttcactaccatcatcaaacacagaccaagaccaagaacctttcttacaaccggagactcttcgacgattctctggtagccacttggactgcatgtatctcgtagtcctccatggaggcctagacattccttctttcttcatggactttttcatctcaccacaaaccaacgaaacaactcttctcagtctcccttctgtcgccacaaacactaatggaagcatctcagtcatatctttgtaagcttctgtctgtctcgctagctcaaactgagttttgaagtcaagatcaattatcacacgtttcagcttgcttacgccatcacggttgctatcacccttcaccatgacgtcaatgtactcatacttcctcgagcacctaaacactctacaccctgtaacaacattttcacaaacaaaacccacaaataaatatcttatcatcacaaaacccacaaataaataacttatcaaaaacccacaaataaataacttatcataaaaaaacccaaaaaagtaaagaaatagagactttcccattgttatctaatagtcaaggaaaaggtcaaaggttgtttttatatggatctttctagatattcatatatattatctttctttgaaagtgtgttgtttaccttcacgatgatcaaaagaagagtcccatgaggttttggagagagaagcatcatagccttcagatctgagtttagagacaatcttgttcatcacatctctcttctcatcgtctccttcatatgataaccttcctccattgataaacgaccatatcttctcttccatctccttctctttttctccttttgccctaagaatctcctgtaaaaatatttctagctaggtttaacctttttatccagaaaaaaaaagagaaaatgtatttggtgaaaagagatatgtagagaccttaagagtgataagagccgttgtagaactctcaatatgctgggagacggtgatcggagactcgatataatcgagcacaagcttctctaaatcttcttctcccaagcttcccatctcaaaatgttctttcacctgtgtctcttcctattcttctaggtttttttttttttgagaaaaaggttgtgagggcaaaagttattatgcagttgagtctctttatgaatataactgagtgacgtgtgtcataatcttatccattgtcatttgcattattaaatgaactgttttattattcgttttctaatgttttgttgtattagcttatatgttttagataacatgagtttgcgtcgtgacttttctttcttttttgcccttttcttcgaaatacaaactactttgcgtttgatgtcatacgcgactgtataaaaagtcgtttcatgtcattttccacttgtcgtatattccacatagtcgatgcttgagattataattatgtatacgtggatattttagattaaactcaattcgtaagtcttgatttttatttaatattttttgatattttaatttgttttagaatgttatatctaataaagtggtaatttcactatgtctaatcacacaaaaaatagtactagttttttttttttttaaatgaaatattaattgatcaggagtctatatagaagatatattcatattattcaaagaaattaaaattaatattatttttcgttgatttggaccgatccctcagtctttggtaaaatcacaatgtcaacactcaacagaaaaccaaaatgcaaaaccctcacgagactaatgtttcttcaatactttatctgtgtctattgaattatcgatcaaagtagatagatatgcacgtcatagcatatactataatgttgatcgaaatgggctcaccatcgatccaaactcactgtcacatatttggaagcaaggttatctcgtaatcaattttgtctgttcattgatggctaaaccatcttatataaccttttaatagattttgtcttatacgacgataccacacgcatatatatatacttatcaagataaaatattagcatgacgatattgaatctctaagataattataataataatccgagtgacggtagctaataatccgatgatttacagcgttttgatttggatgctctctagtcacatggaatttaaaattttcgtattgggctataataactcgtttaaacttgcaattgttggaattaagacgggctaaaagcgtgtggaccgtatcttctttatttgtataatttttgctttgaaattcggtcctaccttcttattttccgaaatgaaatcagtaaaccggaaattgaacacattaaaccggattcctgaaattagcggagttaaatcgagttttaaacccctctgacatgatcatgatgtcgaaaatgactagaaaactttcccaaattcgttatttaggtacttaatttactaaaattaaatgttatacagatcatctaataattagattactttgtttgcattgtatgtttgtttttgtagatttggttatatctgcaggtgctgtttctcaatgagtgaataaaatagaaggattaagtatctaattagaaaaattatcctgatgttacattgttcgaacatgaagagagacaagtatcgaaagcatatattttcaaattgtcgttgaagcatagctataggcaggaatcttagcaaccttcttcttcttcatcaacttcctaactctctcaacatctttccacatccctctgagtgcatacacattagccaattaagacaacataaacccctaccatcaagcaaccccaaaccatcacgttaggcttcatcggcatctctttaacaactttattggcctccttaagctgcccgtcacggctcaacagatcaactatgcatccgtaatgcgataatcctggttctagttcgaactctgacttcatcatcacgaaatacgtttttccttcctctacaagacctccatggacgcaagcaacttcttagttataattagttaactgactttttgaattttgattattgtgtgcttagccgaagtttctagcaaactaccaccggatttagctcgaaagaataaagcgtgacgaaatagattaagacaaaacaaacaaaaaagagagattacttataattatcaaagtacatatgattgaaagtgatggtttggttataatttaattacagtttaaactttaggtattttgttgaggtcttatataaatacacatcatcgttcttatcatatgattctgattttagatatttcgtaagaaaactaccaattggttacatgtgcaacaatgaatgcaaatatgcaattcatgctaaattggaaaatttgtcatcattaaaattcagtgctggagggttttagacgttgagcattcaaatcaaattcttttgattttgaaaggaaagtttaattacaaaatttccaccgaatatttttttaagaaaatactgaatgtttttaactgatctaattataatgaatctaatatgggtaatattaggcaatagccaaatttgacatcttaataaagaaattaactatgtgtcagatttttttggtaaatgacttttttttatggtggggtaggggtgaagaaaagaccaattaaccttgtaaacttatagtttttacgatgatacatttgtttgtggtggtggagacttcataaggttcagtgagaaaaagaaaagagactcataagattcagggagaaaaagaaaagagattcagaggtggaagtcataatcatcgtgatattattacagagtaagtagcccagaaagagtgtcatctgacgacaaaaaattaaagaaaaaaaagaaatcatgtactttttaaaaataacatgaatcaaattaatataacgaaagaataatcatcgtaatattattataaagtaaatagtccagaaagagagtcatctcacgtcaaaaaattaaagaaaaaaagaaaaaaaatcatgtacttttttaaaataacatgaatcgagtaaaaataacgaaagaaatgtatttttgaacaatagcatgtcaaattaaacaatagcatggcatattagaaaatcacatgtaaaacagaaatatagtatgttaaacggaaagatactggtacatcataaaatactacataaaatttagaaaaaaatcatgcaaatttaagaagtgacatgaataaaataacgaaaaaacaatttggcatttggtcatagtcatcgtgacattattacggagtaagtggtggtagagaatatccataaagaaaagagaagttgacgacatagatccggcgagggagagaatccagcaaagatagagaaagagaaaaaaaaacagaaagaaaatgagagagaagatgagaaaaaggatgtttcagtaattttatttgcctttccgacaagatactattgtccatagtcatttactctattcttattgatttcatagttatttcttacatatactcatctaatatatcattttcactttttatgaataagtgattttgttaatttgtaattttgtatattcagtaacattcatgtttcttaaaaaagggttcattataaatattcaaatcagtttttttaaacgtttataaccgtttatacaaaaacactctcgatgtttttcttttagaaaatgttgctctacaattcatctaaatctttagcacgaaaattcatgtaaatcttcagcaaaaaaaaagaaccatggtccatctataggagataaacagtcaatgaataaaaaagtatttatctaattcaacatcttcaatgtagtcctcgcataaagaatgatatccaccataagcttaaaccaaaagatctttagatactactaaaataggcagtttactgtctcaataaaatggaaattttcatcacgacaaaaacacatattatataatccatcggctattgatacaagtagaagatgcaacatatagcatcagagaaaaacctgacacaacaagccccacatcctttttttagcaattcaaaaatttcaagaacacccccaaaaaggaataatcaaacgaaacaaaaaacaaaaacaactccgatgtttttatgttttaagttttaaaaactgataaacaaagaaaaagaaaacgctgcgcatccctctcagaaaataggaaaacaacacttagttttcggaccactcactgtccaagacctagcttcacctattccttcaccaccatcatcaaacacagaccaagaccaagaccctttcttacaaccagcatctcttcgacaattctctggtagccacttggactgcatgtatctcgaagtcctccatggaggcctagacattccttctttcttcatggactttttcatctcaccacaaaccaacgaaacaactcttctcagtctcccttctgtcgccacaaacactgtcggaagcatctcagtcatatctttgtaagcttctgtctgtctcgctagctcaaactgagttttgaagtcaagatcaattatcacacgtttcagcttgcttacgccatcacggtcgctatcaccgatcaccatggcgtctatgtactcgtacttcctcgagcacgtaaacactctacaccctatataacaacattttcacaaacaaaacccacaaataaataacttatatcatcacaaaacccacaaatatataacttatcataacaaaaacccacaaataaataacttatcataacaaaacccaaaaaataaagaagtagagactttctcattgttatctaatagtcaaggaaaaagtattcaacatttacaaaggttgtttttatatatggatctttctagatattcatatatatatttctactttctttgaaagtgtgttgtttaccttcacgatgatcaaaagaagagtcccatgaggttttggagagagaagcattatagccctcagatctgagtttagagacaatcttgttcatcacatctctcttctcatcgtctccttcatatgataaccttcctctattgatatacgaccttatcttctcttccatctccttctcttctactccttttgccctaagaatctcctgtaaaaatatttcctgaaaaaaaaaacctttttatcttgaaaaaaagagaagagaaaatgtatttggtgaaaagagatatgtagagacctgaagagtgataagagcctttgaagaagtgttgatatgctgagagacggtcatcggagactcgatataaccgagcacaagcttctcgaaatcttcttctcccaagcttcccatctcaaacgttctttcacctgtctcttcctattcttctaggttttttttttttgagaaaaggttgtaagggcaagaatttattattatgccattgagtcttctttatgaatataactgagtgacgtgtgtcataatcctattcactgtcatttacattattaaatgaactgtttcttaatcgttctctaatgttttgttgtattagctttatatgtttttgataacatgagttttgagtcatgacttttctttctttttcccccttttcttcttcgaaatacaaaacaactttgcgtttgatgtcatacgcgacggtacaaaaagtcgtttcatgtcattttccacatattcgatgctattatatattccacatttggagtataattttatatacgtgaatattttagattaaacttcaattcgtaagtcttgatttttattcaatatttttgatatatatatatatatatattttggagaatgtgatatctaagtaacaatgtgaaagatcattgtcaagtaatttcactatttttaatcacacaaaaatagtagttgttttttgaaaaaaaatcttaaataattgattatgagtgtatatacaagaatatattcatattattcatagaaattaaaattaatattatttttcgttgatttggaccgatccctcagtctttggtaaaatactaaaatcacaatgtcaacactcaacagaaaaccaaaatgcaaaaccctcacgagactaatgttttttttaattctttatctgtgtctattttattatcgatcaaattagctagatatgcatgtcatagcatatactataatattgatcaaaatgggcttaccatcgatcaaactcattgtcacatattcgatatttggaagcaggattatctcggaagcaaatttgtccgttcaaactcatttgatggctaatctatagtattaacttttctatagatttgtcttatacgacgatgccacacgcatgtttatatatatatacatacttaacaagatagtaaaatattattatgacgattttgaatctctaggatattataacggtagtaataatccaatgatttacaacattttgatttgaatgctatctagtcatctagaatttaaatttttcatatggtgctatactaataactcgtaaaatagtaaattagaagcctaaacttgcaattagggaaattaagacgggctaaaagcgtgtggaccctatcttttttgtttacataatttttgctttgaaattgggtcctacccgctgtcaaaacaattcctgggtcccgccttgttgttttccaaaatgaaatcagtaaaccggaaattgaacacattaaaccggaagccttcaattagttgaaatcgagttttaaactcctctcgacatgatcttgatgtcggaaatgactagcaaaattgccaacacgatatctgagtacttaatttactaaatctaaaactgcaatgtcaggtgttgtttctcagtgagtgaataaaatagaaggattaaggatctaattagaaaaattatcttgatcttctttgttatgatgttacatttttcgaacatgtagagaaacaagtttcaaaatgtcgttgaagcatagctataggcaggaatcttagcaaccttcttcgtcttcatcaacttcctaactctctcaacatctttccacatccctctgagtgcatacacattagccaagacaacataaacaccatcgttccacggctcaagctcaaccatgtatggagccacccactcagccatctcaacatccccaaacttctcacaccctcccatcaaacaaccccaaaccatcacgttaggcttcatcggcatctcctcaacaactttctttgcctccttaagctgcccgtcacggctcaatagatcaactatgcatccgtaatgcgataatcccggttctagctcgaactctgacttcatcatcgcaaaatatgtttttccttcctccacaagacctccatggacgcaagcactgagaactccaacgaacgtgatcttgtttggtctgacaccgaattctctcatctgacgaaagcattctaaagcctctaatgtattcccgttagctgcgtaacccacgatcatagaactccaagagacaacgtttctctgtcgcatttcctcgaatatgtgactcgctaaatccatacgcccacattttccatacatatcaatgagcgaattcagcatcatgatatcagacttctcttcggtcttagcttgtagaacgcatttatgcaactgaaaagccaagctcaagtcacctaatcctccacaagaagcagtcacactaaccatagtgaaatcatcaggctcaagtccactccttttcatatccacaaacatttccaccgcctcgttagctcgaccagcgtgattcaaccctccgataatggcgttccaagaccccagctttctctcaggattttcatcgaacaccttacgtgcgttctcaaattcccctgctttacaatacaatgtaatgaacccactctcgcagaactcatctccgacgaaccctaacctaacggcgacggaatgaagctcctttcccaacgtaaaatcatgaatttgaacggctgctttgattacaatcggaagagaatatcgatcgggtaaaacagtcgatctcaccataccgagatatacttgaattgcatcgagaggagactcatggcgaatgtaagatcgcatgatgttgttccataagaaagcgatcggatattgatcgaggattcgtgaacggaagatgtcaccatggatccgacgaacacgagctaggctagtgcagtttgataacagagtagctaagagtttgtttcgatcttgaggcgaaagaggcgtaaccgaggaagatgatgtagtgacgaaatgattcaaacggtgaaagatcgtgaagtgatttgttctcttagtaccatgaacatgaagcttggagataagaccagagaagaacatgtgtcttttttgttgttgtcctgattcaaaactaagattcttaagtacacaaagttgtaacagtgaaaaagaaactaaaataagctcaaaagatctgatattatgaagctgaaagattgtattcgagtagtttaagagactcacaacaacataaatactgataatccaaagcaaactgttttaacagatccaaaataacaagttatatattgaaatcaaagatcagttactgagctttttctttgtcttgacttttaacgccggtcactgcgttcgaaattgatcttggttcgaccagaaccgccgtggtcatcgtcccttgaagagctaccaccaccgccacttgctctcatagttccaccagacccgatcttgtccaaaggtttcttacccttctttaaatcagaaacccacttctcaagaccgaaaggatcttgttcctcttccttctcaaactcaacaggtcggtctctcttactacccaccctctctgaagcccctgtgaaagctttgtcaggcttaaacctctcagtattcttgatcttatcgagctgctcatcagcgtttccatacatttcttcatcgttatccttctttggcttgtacaaagtcgaaagagttggttgtgcagtgaacaagcctttgtcgtataagttgtattggtcatcagcagcgaaaccagagtccattcctttgtcttggttaaacagacgttgatcatacataacttcaccaccaccttttcctccagtagatgccattccaagagcaactttctcactgatgtcacggtctctgtctctggtgatcttgctcttcttccccatggcagcatctttggcatccaaccttctctccctctctctttccctgcgacgctcttctcgtatcttttctctctgaatccttttttccctctcctccctcgtctcttgaggctcttccctttctctttcccttcctctatcctggtcatagttgtcataatcacctcttgggtcaacactttcactcctacccctgtcagatgagacaggcatactcatagcagcaccggttctttcggagcgagctttttgggcaagagccctcaattcctgctctttcctttccttgtccttcatcaccatctctttttgcaccttggaacgcattgaaacagcctctctagctttctgctcagctacatagagggcctctgataacttggcaaagttatcattgatctgaacgtcttgtaggccccttccatcagcagctagacgtttgtcaagagggattgtgtaacctttcggattcttccaattggagatacaaggagggattttccagtcttgctggtccttgacggtaacaggcctgggcggtgaatgcatgaccggaacaggcggagaaccagaagcccttgggactctcttgtgcttgaactttggtggatcaagtggatctacaggcatctccaccatcctaatgatcctctctttagcaccagaattgaaggcagaagattgctgggatggcttatatttaatgtactgtgaatctcccgattgccttgctatattactaggctgcgctgcactcagtctcacattcacaatcttctcaatggcagctttcgtttcttcagcagtctcctgaatctccttctgcaattcctcctcttcatcaacaacagtacccaagtctccctcgtttttcagaaactttggaataatatccttatgctgagaataaacaatcttcctcgagttctcattctgcctcactatagcgtcaaagaccacgtttccctgagcatcgacagtaacagggagagtcttagctccaggcttattggatttattcttacccataagaagaggatactgaggaagatgaatctccgggaaagcaccaccatcgccaaaatcctctggattcttcggacgtaaaccttgacgattcaggtaagcaggcaccactttaaatttgatactggaggatttcaccgtctcggattcagtgactcggtttttgaaccaagcatcattagaatgatcataatacgtggtagtggttgatttgggcgcaggaagatcattaagagacttcatagtctaaatcaaggttttcaacaaatcgcaacctgcaaacaaagaacaataacgatcaggacatacctaatccgtaattacaacaacaagcttctgataataaaagtgacagatcctccgaaattagggttttctagcgataaactcgacgcgagcattagatcccgaataattccgattaaaatctgaaaaatctgggttggattcactacaatagagcggaaaacaagtagggtttaggaatcgctgaacatagagatcgacaaaaacctaaaaacaacaggaggaaagcaaaaagcagaattgaatctgagaaatcgaagaagctaacctctgaggaaactaatcgacgggaagagagattctgagaaaggtgaaacgatgtgcgaggcggcgcagaccgatgaagaacaacgaacggaagtgaagcctttttctggggaaaaaagaaatcgggcgtgaagccttttctagggttgataggattaacaacaaaaaaaaggaatcaattgtcttatacgcagtgtctatgtaagtcggtttaaaaatagacgaaaaaacgaaaaggataacgtcgcctgagagattcgaactctcgcgggcagagcccatgtacttagcaggcacacgccttaaccactcggccaaagcgacttattgtttttaaatcgaagaaagttatatatataactataggtgttggctttttgatatatacaacaattctgagcatctcataattatttgcattgtccttaatgaaaatccgtctcaaacacattcccatagtttcgtttaaaatactgaattcaaggttaaaagaaaaaaaagtataagaatttggtgttggtacatctcaactggtatactgttaaaccacctcgaaagggaaggtgaaaaagttcagaattcaagtaccaatagaggaaatactagttaggctttggtttgtctatcaaaactcaaagcaagtgtaagtttcatatcaacaaactttcttctctttcatttttttataaaaaaacaatagattgatggcgttagtttgatatttaatgaaccaatttatgtttttctaatcaacaaccaatttgtttgatataaggtaaagaaacaaaaatgatatgaatgaactacgtaggctatgtaaataacgactacgagagagacttaaatgtatggtgagaaatattattaaacatatatgtggccatgcgggataatgggaaggttaatggttttgcttctatggaaacaacggcatggtagttagtttccagttttggtggacaacttggcgtggttgtgttcaacgacaaactatggtccttgactccttgcattacacaactcaaaactcggaatatacttgagtatatcatatgcatacaattttcaactttttctgttaaatcgattcatggattagatgaactattttgagggcttttcagcattcgattaggttaaacggctgttgcgattattatttgttttcataggagcttatgctatgaacagtaatcatataatcatttgtataaaagtgtctatttctgatctaagcacagtaattcatatttgtttaaccccaaaagcaaaaaatcatacatccgtatatatatttgagaaaggaaaaaacaaataaagaccgtgctcgtgggtggaacctccgttgaccgcggatcccaatataatggccttttcctacgggatagttagatgcattactaattaacgtaacaattaattttgattcaaatcaatgtacgatgattataataaatgtgttaatttaatcaacttatgaggccggtgttgattgatgttttcgttgagaagactcacccaatacttagttgatttaacattttttttttttttttgttacaaaggtattaatttccccatctaaggattgcgtatgaaaaaatatttgttcaaacataatataagttcgttttacaaagattaaaaatgaataaaaaaaaggttttaaatttcacatcgttggatttgcatatgagttagtgcatggacatgttaaattaagggtcaagccattaattatgtctgactaatgcaaacaaagtcaaacaagaggaaatgataaataatccttaacctgcaaattcgttttggtagaacgataatcttttacttctctggtacaaattgtttttaattagggaaagaaaatgagtttctatttttcttctcaaaagtgtatttcctaaatattgcattgtacttgtatttctcattcactgtaaacaataatttaaattgaaaaagttggttatatgaagctaacagtagaaattttgtgaattaaatacagagggtgataataaataccaagttgaaaagattcaatatatgtcaactaacaaaccatctcagataatacttttatctaccgctactttgatataaatagtttaattctcaaatgttcacctaaagtataaaaaatggtcacctaaactatataagttaattagcaaaatataaacaaaaaaccatttatcgtccaatcacaattggcgtgttcgtacaaaatatctagaagatccgatcaaaaaaaagagagcaataaacattatatggtactatcaggtttaatcaagtatattaaactctggtctgaatccaataattaaataaacttcagaggtttggaggctaaatgtttttaaaagaagagattatttaaaaataaaactaaggaaaaagggggccaaaattggaagagtcgaaaggttcagccatcgaaatgccattttcgtcgctgtggtaataaaagctataacaattattaatataccaaggcgaactaggtggatacgccgagtcaacgtacacaaactcgctcaatgactcatcgtaactcgtctctagactcggtaactccactatctcgcttagttcttccgccgtcgacgcagcttcttcgcttgacggtgacaacgacgatgacgtacacgttgaatagctcgaggaagacaactgcgtctcagctggggcgatgacggtggttggatcggagactacgagagaggaggaggagggggagaagtccatggcggccgctacggcggctgcggcttgaacgtcgcgtggagaggaggaagctggacggggaaggtaagtggcgagctccgggaagttgaggacggcggaagttcctttaatggtgagagcagctgcgtcatgtgcacgcgccgccatttccggtgtggagaaagtgcctagccagattcggctcttcttgcgaggctctcggatctcggagacccatttgccccacgttcgcatccggacgcctcggtaacccgggtcggatcttacacgtttcttggtgttggttcggtgggagtcttgttggtgatgatgatgatcctcctcctccggcaccggagacgattgtttgacggagataatggatgactcggtcattgacacgtgagtttgactcagtgagtgtgaagagagtacgtacgtagggtttatataaagactagagagagagagaaagagagttgaagtattgaagtgaaatgttgaagttagttagaaaaggacagtcgatcgcttacttatgatgacaggtgtgtacacattataaattcacacatcaatattatttgagaatgacccattttttgttttcgtttatttaatgttgatattttgcattcggcaagtaaatgtttatttatctcttcgtgataacctatgcatggtccatgtatgaacttgatcaattcaatggggtaataacattcccattcggaattgactaggaacttatatttttgttttgttaaaattgactaagaacttatgcaatagtaaagggagaatgggcagaaaaaaatcaaaaatatgtttaacctattataatgtgtccatgagcttatttcaactttaattttaatgggatagtaatatttcattaggaattatttccaaatatgctactatgagttcaacaatatagcgattgatacaatatgacgattaatcagaatgctaacacgaccatacaactagactatgattttttgtagcgatgttttcttaggtctcgttggtaacttggtctattcactaatagaatatcattttacgatcaatataaattgtctataattcgagattgtgtgtttttttttgtcgactagtgtttacttatacaatatatagctaaaatggagaaatacaatcatatatatatatatatatgtgtgtgtttgtttgtcgtcttgtatctttcgaaaaataaaaaattatacaatttagtaggaagtgaatgtctttcgatggaagccgagttccccaactagatcaaagttcgaatcaagaaattatgaaatactacacataatatattagtataacatgtttggtctctttaattttcatttttttggccaaaactttggtctttttcattcatctttgatgcatagatattagttgcttacacctttctagtacaaaaaatatgagctctctctagtctagaaagtcgggttaacgttaataaaaatgcaaataaacagatcatagagtatgatttacttacttgttttggggttagaaatgatgagaattgagaggaagggaagaggaaaagagataattaagagagacccacaaggagtgaaggctgtttgcccccatctgagcatggcatttctgacagttgtcaacacccttcccacatgccttctttttaatctcctctaattttcatttttcttatcatcattcttccatacattcgatatttaatgttcatttaccacatttttatatcattatttaacacatttccgtattttatttaccagctcttcttcttcatagcatcgttgtagtgcattattaatctagctttagtatttttatgatgttgacgttttagtacctgagagtatcatttgaatgtaacctttatgatcttaattactgctagaacttagccattctacttgttcataataatagtatcgttacgttttaactctcaccaataccaaaggaagaactttgacaaacaaaacaaaaatatcacatgaagaattttagacaaaatcgtagtattaactgtatcattcgagtgttttagtaaataaaataatgtagtctactagttagagataaaataaaattttgtgttttttgttaatatgtataaaaaacttaaacaagagtatataaatagaaaggggcaatatataaacatgccgttttctcatcactggtcaaattaggtcatctacaatatgtttagacacaagtttctgtttttgtttattacttttagttaattacctcgctttaataatctggtagtaaatgagagtacaatacttcggttttaagtctcaactttgaaatatatttttttgaccatttaatgttgtttatattggtttgagtgctagagtaaaaggccggtgtaaactagtgtatttcaaatttacaagtagtatttctaggtatcgcttctatattatagtatgaacactgatattcaaaaactaactttcatggataatggattgtgttgctggagttatttaatccttacgctactagctactttataaaacttaatatatacaatattgaattgataacacatccaaacgaatactgaactagctaagtgaaattaaataaatattatcaagaacttcaaattgaaaaatatgcaatttatctatagatttattataattaaccatttattcggaccgaagatcaaaactagattaattactctcatgaggtcagtgctcaaataaacagaatttataaaacgttactatataaatatgcaatttttctcatggatatgaaatatgtttttaataattataagatatgccttgaaattagaaattactaacatggcgtacctcgtgcataagattagggcttccatgctaccatcaactacgtaatgaattcctctgtttttatttccattataaaataaagttatgtgaaccgccaatgccattatgaaaaatccaacagcatccattcctcgcactaaatagttatgatatttttttggacgaagaaatatctaaacgtatgtgtatcgtattcattgatctcgccgaaataatgttgtcatggcttgatctaaatagtagcaacattacataatatcgtctagatcgtgcatgactccaaaagaacttgttacaaaaataatactggtaaataaacaagacggtccacaagctctagataatagtttagactttggtctggcattttcccattattaactgagaaaggtagaaaacaaaaagaaaaccaagtggtattggtctaatggttttcgcttgatcatgaatagtcatgtaggtgtaggccagagatcgtttcccctcaaacggaaaattactaaaacattccagttgactagtcgaaatggtgttatgctttagatccattaaaaaaacggtgagtgggctactcgaccgttacactcacctgaaggattagtcttggctataaaagttgggattagttcctggtaatgaaaaaagtaatagaatgaaatgtgttctcttttcacttgttcacatatatgttggtagatgaaaacaatcaataagctaggaccagttttgggcctacaagaatatgaggttggttttattatgggctttaaagaaatgggtccactaggacccctaaattctcaaacttacgcaaatttaaccatacaacatcaacgttcttcatatttgtttacttgacgcagctcgatatttcactatacatcatttcactgtccttttacgcttgccacggttgtctctaattattaatcggcacccacctaaccagtaaccactacacaaacaatgttcgtacattaaatcttgcattacacatgtatgtacattcatgtttgcacacttttagatattttaaatttctcgattagtgagtgactaagaaaatcccatttatttgtgagcttaaatgaattgcttgacctcacatatagattatgtaatcatatgttttttttttgtcatatagtcctatataagaatgttaaattaaattattcataagccgttacgtgttcttttgaatagtatctgtcattagcatacctacgattcgtacttcggattgtactaagacatttaataattctaaaactgtttattgcattttttatgccgtacttgttttgtattgatctatcatagtctaatactattatcttactaatacgataatatatcaatgctgctaaactaacgaatttaaaatgttttattcattttgtatttttgtgacaaaaaatgcttattttttgacaaacaagaaaatgtttattcatttatcgattgatcttattcatcaacatcttcgacatatttcttccataaccaatgctgtctccaaagaagataaacctcttcaatcggaacctgtttcgtctccggcaacagaaagtaaacgaagcttcccatccccaatataagtccggcgaataaaaggaatattccgtacttgagatggcacagcgacaccaggaaacactgcgcgattagagccgtgaagaaaaggttcacgcacaccacaacgctctgaccggctgatcgagtctctagagggaaaagctcgctcggaactaaccatcccattggaccccaagatcgaccatacgccaatacaaatagacagataaggaccacaagaatcagaccgagcgattttggtagctccttaccttccccaaacttcaaggctagtgttactcctactacaacctgcgaaaaaatgaacatatttagggtttcaccggaagttacttgtttagcaagatataccttgagtttaaaaaaacagagcattcaccatgtaacagaacatctccacgctagcttcaagaagaagaaaccttcttccaaatttatcagctgaatacatagacatgatcgccgcgacaacaagcgcagcatttgtaatggtagacgagataagcgacgcagatccaccaaaccctaagctctgaaacataaccggagcataaaacaggatcgaattcattccggttagttgctgaaacgcaggaagcccaatggctccaatcactagctgcggtctgtttcttctagcaagaagattgcgaaacggattcttcacggctctagcagcgtcactggcttcgacaagatcctgaaactcagcttctatattgtttgtgccacgtactttgatcagcacggctttagccttctcgagcttcccttgctcgacaagactattgggtgtttcaggcaaaacgagtccaccgaggaacatgagtatagctgggacggtggcgagaccgagagagagtctccatccccatggatggatttgctctgttttgtagtttatcaaattagcaactagaattccaatgcaagttgttagctggaaaagctgattcacagttcctctaatcttcgctggagccatctccgagaggtatagcggaaccgcctgtaaacgcaaacgcataaattaaacgcaaaactggaccactcacttagacattagagttaataaattgtggtgttttttttgcctggtttccgaatccaatgcctatgccgaggaagattcgaccaaggattaacatgaggatgtttttggctgcagcgttaatcactcctccgaggaagaagctgacagagccaacgaggatgcttcctctcctaccgtagattctggtgacgtaagaagctccgaaagttgagattaaaccggcgaagtagagagaagaagtgaagagtgtgaggatttgattgtcgtatttgcagtaatctgtttcgtttagatgcatttgctttcttttgtagatccctgggaagaactctttcaagaaatcgtccattgatgtaacaccacctgcgtttaacaaggacgaataaacaaaaatgagcattggtcttgcataggttccttgatttacaagaaactaagcagtcgacacttaaacaaagctgaagctaactctcgtcagagagggaactgatattttcggacaaaacaggggaaatttaacaaaactgaagcaggcccttttcaaaaacaatacttggcagtttcagaatctggctatttgattggtataagataaaaccagatcgagaaagttatctaaccagagactccaagatcatagccgaaaagagagcctcccatggatccgacgatgcaagcgaagatgaagtaagaagtgatccgatgttcatagagatgagctctctttaggcctccttcatcggtaagagctccaccggccatggctttaaaatcttgaagacaaaaggaggaatattctggtctccctctttgtaataaaatttgactgagggttgtgaactagttgtgatcactatgatcaagattttagagataaataaaaaggttggatattagcagactagctgttacactttgaccatctatctttccttatccctttttctaaggatatatatatgacttcatctttcttgattattacaatgactagttggtaataattttcttgataagctatgtccttttaaagaaatttcaaatatggtgatgatctaaaaaataaagatatttagatcattttctatataaattatagtatatctcgactccatgtcatattttatccataatttaatgctagcataccattaattattttctccataaatgagaaaatacatttccctttctattgaattgtatcataactttgatattaaaaccgtcttaattacctgagttgttcagttgatctagagattttttttttttttgcacaaggtattgagaaggtgtgtccaaagttggatcgaacttgatgaatgttatttgagtgacaatgtcatcattttttggcgatctacatgacagaaaaaaaagaaagatgttgtaagagttgtttataactaccacagatacaaacaaaagaaagagagatgctaaaaggagataaacaatatttttactctttaagacatcatttatcctctgtgtcctctaccacataaacattcctttgttggcttgagggtttcttgagttagcttcaccaaatactaattttctatagcttatacctttcttcttgttactggtttcaccggcccctacattgtggtaattgttggttcatatacttttgacgcattatttggcttaattacatataagattaatagatacaaaggacatgcatttgttgaacttacatgtgtttggacataagttggtatcgtatccaatccatcatccgcattaagcttcctttgcgcatcgctcttaaacaaccatagattctacgaacctataagggatctcaacctataaactcaacgaaacatgaatgagatcagagagagagagagagagagagagagagcaatggtaataagaatacaaaaccgatttctgatacggttttgcaacgtgaaaagatcatgtgagatattttagggatttctaaactgattatctatccgcattacaaaaatgtaccgtaaaacatatatctaaatacacaccacatttacgatgtataactttacgtaatagacatgatatctacgatgagttaatttttaaaataagatgtgtttgccatttttatcaactatcaccattcacccatcaaactattattttgacaagggaaattgtcaaaagtttgaatattatacgtagctcatgataacacaccgattaaagaactcatctactttgtgatatcaatttaagagtgatccatcattttcgattagcttgaatgatagaaaatactgattgttgaattgttttaaacgagctaataataataatttctacaaagtgatcggacaaaagaataaagtccaatgaggatgagacacatcagattatttaacataacacgtcagcaaattaagggatcgaagaaaatggtttagcttgacacaaccgccaaagcaaaaaggctgaagttttcctttttaggctctttctcttccacgcggaaattaataataaaaaagatccaaactttgaagatagcgaagagcaaaaagataatctctggctcgatttttgttggagtccttgattcgagcaagtttaaagactcgagggttttcttctggataacgtaattagatactcgtgtaagtgcaatttctctctttttcttctgttttatgggtgttggtgatttagggttttgcaaaatcgttttgtttgctgggtgattaagcttgggtgatttagaaagacgaattagatcaaggaacttatttcttgttatgagtcaatttgggttttaaagattcaatttttgatcagaatataatctaattgttgtgtgttgttactcgtaatgcaggttttctgaaagggtcatcactgctattgtcatagcttgagaaaggatctatttttaatatcagtgatattggtatctatgagatttggagtagttgtttggaggaacgtgtcctcttgcttgatgtgaagattgcttcttgttgtttgctgtttcttaatggagtggaggggaatcctctgctcgttgctttttattgtttccgtgggagagtcgtcaagtagatttgggataatgtggcatcctaatcttggtgttgattctggacaatacttgacttggccaatcttaagtgctagtgtattcgtggttattgccatcctcctccccatgtatcttatctttgagcacttagcttcttataatcaaccagaggtttgttattacttctttaacacccactttgtcgtattctcttactcataataaatgatactgattcatctttatgactcttcactgacattgctattatcgaattgatccattaaattgataatatcaccatcatcagtaactaagcataacgctttctcttgtaaattacaggaacagaagtttcttattggacttattctgatggttcctgtttatgccgtggaatcggtaggtttaataagttactatatactttaatcctgtatttgtagtgaaatttccattaagatttgtgttcagatatttttctaattcggggtttcttataatttccgagcagtttttgtctttggtgaattcagaagcagctttcaactgcgaggtgattagagattgttatgaagcttttgcactctattgtttcgagagatatttgatagcttgcctaggtaatgcttatataaccgtcaaagtctgtatccatagcttctgagtcactgactatgatcttttgggcttcaaataagcaagtggttgattattgaagccatactttattcagttaaaaatatatatatttggaatctgttgacttttgattatttctcagttataatttacaagtctatttcttctctatatccgcagatggagaagaacgtacaattgaattcatggaacaacagacagttatcacccagagtactcctcttctagaaggcacatgttcttatggggttgtagagcatccctttccaatgaactgcttcgtaaaagattggagtcttggtcctcagttttatcatgctgtgaaaattggcatcgttcaatatgtatgtgtagtcaatactttctctggactatggcctatgatgtatttctgtgcttctactgacataaatattctgctgcagatgatactgaaaatgatttgtgctctgttagcaatgatcctcgaagcctttggggtttatggagaagggaagttcgcatggaattatgggtaatctcttgtttcctcccttttgaaatgtatttactatatcttgattttaacatggtcatcgacaaaatatctgatttagtgataatgttgcctcattgcagatatccatatctggctgtagtgctcaatttcagtcaaacatgggcattgtattgccttgtacagttctataatgtcatcaaagataagctagcacccataaaaccactggccaagtttctaacatttaagtctattgtattcctcacctggtggcaaggtattattgttgcgttcctcttctctatgggactcgtcaaagggtctttggctaaggaactgaaaacgcgaatacaagactacatcatctgtatcgaagtagttttcataaaactaattgttccttttaagtatccatattcagattggtgtgaaagtataaacttaaaatgttatgtttttacagatgggtattgctgctgttgtccatctctatgtgtttccagcagcgccttacaagcgtggagaaagatgtgttcgtaatgtagcagtcatgtcagattatgcctctatagatgtaccacctgatccagaagaggttaaagatagtgaacgaacaactagaacgcggtatggtagacatgacgatagagagaaacgcttgaatttcccacaaagtgtccgtgatgttgtgcttgggagtggtgaaatcgtaagctggtttcttctataacgaatttatttattttcttaactgttttctcatgcataaccaaaagtttaattttatgttgctagattgtggatgacatgagattcacagtttcacatgtggtggaaccggttgaaagaggaatagcgaaaataaacagaacattccatcagatatctgaaaatgtgaaaagatttgagcagcagaagaaaacaacaaaggatgattcatatgtgataccactgaatcaatgggcgaaagaattctcagatgttcatgaaaacctctatgatggagggagtgtgagcgacagcggtttgggaagcacaaatcggcatcaccagtctagagtctcgggattgtggactagaatgcgaaggtaagaaaaacaaaaggtggtgcaagtgcaaacgaagctgaaacaattctgaagatgccttttttgtggaagtctcatcttcgtcacatctaacaaagaagttgtagatttatgggatgatgcttactctgctggatttaaacacaggtaacaacagatgatgctactaactagttttcctctacctttacacaaactttattgagaagttagatttgtatctcgtaatgacagtttcttacacaaaaataaaataaaatacaaatttgtcatgactaatatcttatgaaacatcttctcatatattgtgtttgttctcaattctgaaccctgcccacaacaaagagttaagtttttttttatttaccctactgggtcctaaagctcatctacccgaagaaactgtacccgatccaacttaacacaagatggtaagagtttcttatcggacccaagttcgatttataatgggctaaattatattcgagcccaaatcgtgacagggccgactctttttttttttttttttggggagagattagccctaattgagagagccgctttaaatagttgttcatggagcgaagaacagagtagagaagatgaagctaacgtggaacaagaaccctaagaaacgatctcgtttggttttatcgaatttcccggatcttcctttcgagaaggatgattctctagagtctcaatctcatcttcattttcgtgaagatgatattgatcgtagacaaactaccgatcaattggactcgtcggaggttggagggaatcatcctcgtgagaatttcgatgtcgaagctaagaaactcgcagagtccattagagcccaaggagacaagttcgctgaggtaaaccagctgtagctaaataaaccctaaaatctataaaatttaggtatttaaatttcagcaatttgtgtactttggttcatcggaaggagttagcatcacgttgttgtgatcacattggtgatgtgatcgtggtagataagtttgagttgcatagtggcagtcttcctttgtttgttaacccatattttcatgattcgaggcctattaaacctctgttacatctgctttttgaaaagttgtcatttttctgaaatcttcttgcctcaatttccaacagcagattcatctttcattggatgatccgttagtttttgatagaaaaaatgaggtgggaagaaattaagactgacttcgaaatagcctttaaaataggggtttatagacctcgaatcatatcaaacgagtctgctactatgctactgaaaactttatcaaagaaaagtaagaacgacctaaagtgaaggggaagctttagtgaatgtggaatggaaagaatacacatgaaaagagtcagatttagtaacgaacttgacgttacgatcatgaaacaattatatcagacttagggttagtaagtttgtatcttccagaaaagttgagacatttttctatgcaacatgttagcatatgaaaggcctcaggttcatcattcatgacatttcttgtaatggtataactttgtttatggaactacttaagtgaattctcttctagttttatcttgtttactcatcgtgatattgctcttgaaggaaggaaaataccaggaggctctagggaaatgggaagctgctcttaatcttgttcccgaagatgcaatcctgcatgaacagaaagcacaagtgttacttgagcttggtgatgcatggaaagcactcaaagctgcaacacgtaatgcgtgaagcttttctgtattgttacttttatttatgtacaatttagggtacgatgaatattcttcaagaaccctcttaacagttcctatggttttcgtcacaggagctactgagatagatccatcgtgggctgaggtacttatacgatgtttctctttaagttattgattctgcatggaaatatggatgttgaaagctttcttacaggaatctggttccttatttgtttggctaaactttttcaaattcgtttttcttaggcatggactactcttggaagagcacaactaaattttggtgagccggacagtgctatcaggagttttgaaagtgcattattgatcaatgtgagtttcacgaaaaatcaaaattaagttatactattatcactttttatatttcattagtcccatagagatcttaattcgtgttattaccattacacaggcggattccagagaggctaaagacgatcttaaaagtgcaaaacaactaataaagaagagagaacagcttcagacatcaggacaggacaccgacactacacgatttgtggtcaacgacaagaacatagagccaaactaatgaaccagagacttgtactgtggtgtagagaagaaatttgtagagtacaatataataataacaacaaagcaagaacgttcttcatcaaggcaaggacttagccatttgtctgagaagaaacttttgaatctttccagtagaagtctttggaagctcttccaggaaaaccacattccttggaaccatatactttggcagcttggttttacaaaactcccgtatctctctctcagtcacagacccgtcatgatacttcaggctgacaaatgcacatggagtttctccccacatcttgtctggcttagccaccacagctgcttccttaattgcggggtttgtgtacagaactgcctcgagttccgtgctgctgatgttctctcctccgcaaatgaccacatcctttgatctgtctttgacttccaagtaaccgtctgggtgcattactccaatgtctccggtgtagaaccatccgtcttctctcatacttgctgcggtgccttctgggtctttgtaataacctagcatgaccgaaccgcctctgaagacgatctctcccacagttgctccatcatgcttcacgctcttcccggatattgggtctctaacatcgacttccgcgaatactgcagttctaattccttgccttgatttctgttttgctctctcgtctggttctagacgatcccactcaggcttcaatgcgcacgagacaaccagaccgcctgtttctgtcatcccgtaaccgtgactcacgtcgaaaccaagcgcctcagccttggagatgactgtagctggtggtggagctccagcagtcataaccttaactgggctctgaagcggtttctgggctgggtgattagtcaacatgttgagaaccattggcgcagcgcacatgtgggtcacttgatacttgtcgatcaagttgaaaatagtcggcacatcaactcttgtgacacagatgtttctggctcccacagctgctgtggcccatgtgtagctccaaccattggcatggaacatcggcagtgtccacaggtataccggacggttaggcaaagaccagtctagcaaagagttaatagtgctcatgaaaaccgatctgtggctatgcaccactccctttggggacgacgtagttcctgaggtgtagttaagcaccattggagtccactcgcttttaggacgtacccacttgaacctcaggtctcctctctccataaacccttcgtacgtgtcaagaaaatccatatcagctgatgaagatgatggcatgtcgtttccgtcgttgagtatgacgagacgaggtctctcatccttgggcaaaaacgagacagcttcgaggactaaagagcttgagtgatggtcaacaaacacgagcttggattcgctgtgacgtagaaggacggagagtgcatgagcgtctaaacgtgggttgatgttgttgaggactgcgcctgacatcggaactgcgaactgaagctcgtagacagatgggacgtttggaccaataacagagacaacttggccgcggttgattccgagggaagcggaagagagagttgaagctatacggagacatcgagaatgagtttcagaccaagtatgaacagtggttgtgtggaggagtgaaggagagtcgccgaagacagaggcggctcgttctaagaagccaagaacagtgagaggacatgagtttgaagcgtgtgggagtaaaagttccatagtcgaatgtattgattttttcttttgttatgttttcaacttctgatggtgcattggtgaaatgaattatatatttttcccgatgtgcttaggtagaacagaaatcattaacttgaaatattttattttgaacttaggctgcttgggtaatacatttctctttttttgggctcaacaactaattagcttaggcttcttggctaatacttttttctttttttgggctcaacggtcatttttttcaattatctaagtattgaaccatctattgaagtggataataccgattatagaaaaagattgatcgattgtttgcccccaaaacaagaaagattgagagatttattttgattgatttgaacatctaatagtaataagtgaaatcttatgttatttaactactgtaaatattttagttaaaatcttatcttgttcgatgaattaatcacatgttatatatacccttacggtctatggttggtcggcctcgtaacaataatactcattaagcttttttttgttgttgtttgagtttttactcgtaagatattgtagaatagattaaatttataagaaaattatccgatgaagcatcatctctttggtcaagaatcagttcattataatgttaaacaaagtgcaaaatcagcagatcaaaagggcactgttgatgaaaagaatttactcttagaagaaggtttacccttcagaatcctttgtcttgctttcaaaagttagcaaccaaacgaaaacaaatttgtggagaagaatcaaatattaaagtgttgaaagttaggtagatgagacaagaagctgtattttgcttgtttgcttatcaatccaatccttcatttgatggattggaatgtcatctgttcttcatctttcagtgtgtcagctgcgtttagaagcatgtccattcctcctacgctttgatccaattctccattgtctttactttgcggtttgccttggagattcttgggttttattcctttctgtttctgcaccgtctccatcttcttctcaaaagcctttcgtgctttttggactttaagaattgcagctttacatgctgtgcaaaaccattctccatttggaaccgattcacatggaggtcgcatgcaatagatgtgatatgcatcatcacacccatcacacaagacgattttatcatcatccttgtcagttaggcaatttctgcataagcatgacgagcaataccaacggacaccgtgtagttttatttgccttgaagtcaagcacctgatgtggtaatacttgtgtgggcaaaaagggtgatcacatgttatatactttccgccactatccacctttgttccacaggtcctacagagttcagaatctctactcatctctacgtggtgcacctcatgattcatgttacagcttgaattctcttcagattcgttcgaatcctctttgcattctgtactcgtatcaacagatctgttatctgtcttcatcatcccttgggttttcattttttcacacactacacaattctcatgaggtgatccgattcccttagatgtacagtctagacaataccaactgtgtgttggcatccctttcccaccaggttgtgcacacgagacatggtacatatcttcacaatgatcacatgctaaacagtctcttgcctctgccttctctccacatagcttgcaaatgtcagaaacactgtcatttctgatgttctctgcattaggacaaggcttcgattccccagtgtagaactgcttcaacttccagattttgaaataaagaagatattagaggattgatggataaagttataataagatagcaccttgaagaagatcatttatgcctgaccctcacctgttccttataggaggttcttgaaagctctaagagactattagcaagaacagccatatcattaccaacatcctgcattttttgccagacctgaaatcagtagttaggtttagttctatgtctaccttcaatctaatgcataatatgtactgaaaacacaaccacattcgtcaagctaagagtttgtgttcagcttccgaactacggcatcagactatatttttcacaatgaaaagaataagaaagacatgataatctgttttcatgcatatttatcttagactaagcatgatttccactaattacctcttggagatccgttgaaaagagcagaggtgaaccttcataaacaccctctttcatcctggtgtctatcagagttctgctcgtaaaatcatcaatcttgaccccttgaagattttcggaaagtaacctatttagggatgcaaactcctttgaagctaaaacatgggacagaacatgctggcaaccggctgtcaccgtctcatgattggtggattcacttgatggtttatttggactgggaggcttcgggagttcaccagtaagatgggttcttatgctaaacctttcataagagacagactcctgtgaagaaatttaatgaaaaaattaatccaaaacaagaaagagctaacatgttttaggagcatattcatgaaagtaaatcatgaacacatgagttgatcacacaaatataacctgagacgaagttcaggaatgaatgcatgatttagcaaactctagtcaggttttcaataagcacagtattaacagcacatatggattttactactatttgcaaagcgtttcctgaaacatagctatcacacactagacaccaatgtagcctgaacaaaatgaagggaacagatatataatcgcaaaattgttacttgaatagccatacgaatataagcagaaatgacccttctctttagctccctcagcaacatgctgagtaattgaggcccaatattcactattgaagcaactacccaaccatcactagatttatagagatcctaatatacattacttagccaaggctctaaaataaaccaataaactaaattcacaaaacatataacaactgaggtgagcgaaagttgcaaaatgctagcaactacatatactccagcattttaaaaccaatcacaacaagaggtggtaccataatagaaaaaggcatgaaaagtacccggctttctgagtgactaacaccttccatggaaaatctatcattttccgaacatttattagcagaataagatctcccaagttttctccgcttatatgtttgtatcttcttactatctctggaactagcatttgcagaattagccatagcaccacatcctgcactccaattattcaatgcttcactttccaccaaaccatttggctgattatgctctgtacctttaccattacttgtcgcctcctccatgaacatcttaaacaaatgttttgatcctcacacagtggagctagggtttcaccaatcttccatcctacaatagacaaaacagaaacttgagtccttatataacccacaaacgaaatctcatatggaaatgttgaccattggtaacaaactatcaaaatgtcttcgattttatcaccaaataaaccatctagaaattagaaaaaacaatatcattccaacaaaaagcgatgaaattgaagacttctctaccataatttcatcagaaaacaacgaatttctagatacggaaacttcaatggagctttatctagacactacaaaagacggaacaaagctaaatccaaattcaaacctctagcgaaaaaaccgacaagagggaaaaagagagtaaaaccgtaccagtgtgaagaaatctgcgtaaagaaccgacgaagagcaaaccctagaaatttgaggaagaggattgatttaccggctctcggagattaagactcgccggtggttctgtaaatcccggcctttcttatctttgaatcatttttaaacttccgcgtcccttaaccggtatatttttcaacttggatctgaaaccggtcaaaaccggtaatcagtgacgcgaaactgacacgtggaagtagtaataaaaaccgcgccggagactcacggtgacggagtccaccacagtaacagattcgtgatgtgcacgtgcttttagttattccctgatcaaagagtcacaaccgtcggatctcaactttagcaatccaacggttataactgaaagacacccaccattctctgtttctttatttcacacttctctctgtttttttttgtctgagaaaatgaatctttttgttactcatgtgttaaagtagctcaagtgtattaacactcttcattcttcaacaatcaaatcaacaaacaaataaacaataatacaattatcaatttatcactaagaagaactgtcgctttgagcagacttatcatcacattcgatttcgtatcttttctttttcttttcctcatatccgtttatcgcagatgagaatcctaacgcttgcgtggggtccttccccggtatcatgaacaccagcagtccaaccgatggctttagccacttgctgaagttggtccatcaaagacagtgaatcccttatgtaaacatgtcctcctggtctcaacatccggtccatctccagcataatgtttgttatgttgcacctatgttccacaattcattaccccaatcaagttcctgacctttatttttggattcaggataaaaagaaaaacgaagtttaaatctttttacctctttttctcaacagagaagagaaatgcagcatgtatcagatcataggttcttgggtaggtgtcaaatggctcacacctagaggaagtaagtgaaaaaagctttaaatgtgatcttgtgtaagttaaagttatgtgggattagaagcaaaagagcagaaggttatcagtctgtaccagtcgtgcatagccccttgtagtccacggtcataaataactggcaaggtgttgaatccgctaacgggaacaatgttcataacccaacagtcaagccccagatcgtttaatgctgctgcaaacctaccaaaatcaagaaatactagatcaaataaactttggtaaggcagaaacaaaaaaagggtgtgattgatggttaccctccaaaaccagctctcatgtccagaacattcctcagtttgaactccttccagcggaaaacccgcacataactctctactacttctaaccaaaatctagactctgccttcataatttcctttcgggatatgtacgcatccatttgaatgctttgtagcctctctggcggatcatgaagacgtgcaggccatgtggagacattagccccatagccattatcaggtaatcgggtgatgcacggtttcatatctacatacctggaacaggaaaccataaccacaaagttgagatttttagaaagttttaattgaaaagctgagaatttggtggttctatcatataatgtctatgcaagaaggctcaaaactattaaaaagaaactagattttcagatgcatatatgtaccaaacatcatcaggatcatcatcaggtctgcacaaaggaggttttgttccagcttcgcgactgacatagcagctgttgtttagaggcttcctccacacagcaatatatccctctttcttgataagctcccaacagattcgattcgtaaggtctaacatttctgaaaaagataatcaaagcgcagaagcaacacccatattttagttaaactccatagcagacaaattattttgttgaataatatacaaacctttccactgctcttgcaagttatcctcatgtttgtaaacgggttgtgcagcccaaacaaagtagcctcctgctctaagcattctattaacttcaagaagaagtatcccatctgtgtaattcatagaaacaaaatgctgtagtcacttactatgctaaagctcaaataacattagaggagaagcaaaaagccagaaattaaccatcgcgtgtccaattaattctgcatctggaacaatgaatcatctcaaaagactggcttggatacaacaacctccgtgtggcaaagacagccaccatcgcaggaacaccacgctccaatgcaaactgtatctgattctcatgaacatcttttggtgctacagacaaggttgtcgtgttacgctgcatcaaaaacgcaccaaagctcgccacaccacagccaatgtccaaagcaacacgggtgcgtgatccaaatgtaatatcaggaatcatctgcaaatttcaatctaagagaatataagatcaacacaaaaaaaaacagattagccaatacaccaaaaaaacaggtaggaagaatcaaaaaacaaacctgggagatctggtctaagtactgatcagctccatggatgaattgagttccacctccagggaaaacaaacttatctttctctcttctaatccaattttgacctcctttatcttccactaaacgtgtatgaggcacattattgaaccatatctacaaagcacaaatcaaagttagtgactttacacttaaggcttagataaaggtaagaacttgatcacactatttcaccttgtctctgctctgtggccattggattggtttcttataaccatctggaggtggaatcaagcaatctaagctctgtttaggacaatgtctctcgtaattttctcctcgatctgtattgttcaatctctttatctcttcttcgttgtctaagcaaggaatgtaatctatcttcgtcttgtcacacaatttgagtttctcaatctgaaaaccgacttccggcgattctttttcctcaaccgacgaatttccggtggctgatttaagctcgtcgatggaatctggatcgaatccgccgatttcgaaggaatcagacatggcaccattctcgttgatgatacctgttctcaccactgtcggtggaagcggaggaggtgatattttgagacgaggacgcggtggaggagatggtgccaccgccgcgacggatgttatgttggtttgaatagcttcggtgacgtttgaagaagaggagatgggaaaaggaagagatggataagagaaggaatctgagaagtgattgaagagaaaaattgttgagattgagagaaacgcaaacgcaatcaatttaaccaatctcggagttttgacaacgtctaatccaacgtcggagagtttcatggcggtttaaaacgccggcgatctgatgatcgctacagagtaaattacaacagatcgagcaaaacagagagagaaaggtggttcctttttttctttcagagagacggcgaggaattgatgaagcagacgctgcagacgccggcgacggtggagagacgtaggagagtggaggttgagacacgtggatgtggtggtgcggaatttgatgtgaagagagtgaagggacgaaactcgacgagtcgcatgaagacaatgaaacagaagaagaaaaagaagaaagtgtacagattaagcaaaaaataaaaaaacgtattataaacctaattagtacctataattcaagtttatagcataaggtctctatttttttatgatttgcttacattcccctaatggaaataaattacaggttttggtcaagacaaatcagaaactagtgtcttttaaatgtggattttaaaactttttaatttaactgttagaagatgagattttatttatttaatgtgatggttgaggatctaaattgaatgacaagtttcagttaggtattgtgttgacttgctgactttaagagagagtatggtatatcaaccacatgctcacgtgctttaatttacagagtgcattcgtaccaataaaatatcaattcaaattttattttaaactatgatgaaaataatataaaaaacttaaaaatctttttttctataaatgaaaacctttatactagtggatgagtaatggaatttatacagaggattgtatttaataaaatgctcttagacttattgattctgctaggtaaatagagaagctcttctcatttagcaccattgctaaatggaccttttttgtgtgtggtagccttattttttgtaaaggccatgtttatgtttagaatagaattttgtaaaggccatgtttataaattaataagaggatagaagttggaaataatctcaactgggccaaaaagccttcatttcggcccatttataatactttggaatagagattagattcttaatatttgttattacatatttgagcgcgtactttaacggtacggaacaccgtatatcgtgttgggatcatgcatttatggttgctttactacttccggtgactggcgacttcgacgagctttatggtttaccgtcaaatacggtataaaaattctagggttttcttctaatcggaaaacttcctcgagaattgttgtgaatttgggttcttcgtctctacttagaagctggattcgttatttggttggctctccaacaacaaatttcaggtaagtagcgagaccaaagatttcaaatttcagtcttcttcttctgtttcctttccctctcgttacaattgggttctcaatttctaacttacatttgtttatttgttctttaaatgttggaatttcgtgaaaagacccgagcttgagtttagtggactgttttgtactactttgtgagactaggtttgattgatttggtaatttctttgtggttgaatcaaccagatctggtcgctgcaaatttcaaatgtgaagaaaagtttggtcgttggtcaatttttcttcgtttcccaagttgtttttgtttcaggatctggtagagttatatagcctgctaagttgaatatgaagaggaagccgaagaagtctgcctggcttaagactattgcgaagaaggaaattattgagattgagtctgatacagacactgatgatgaagttgctgctacaaagttggctccttttggtgaagagaatgcgaagtcttcggtgaagatggaaataaagactgagtcaaacatagatgaagtttgtggtaaaatgatggatctttgtgttgaaaggaacgcgtcaaaggatgatgctttagctaagaagaacccgaagaaatctgctgtggctaagaccattttgaataaggaaatcattgagattgagtctgatacagacacagatgaagttggtcctagaaagttgcctctttgtaatgaagagaatgcatcaggggatgatgttttagctaagaacccgaagaagtgctctgtggctaagacgattgtgaagaaagaaataaagattgagtcaaacatagatgaacttggtggtagattgctggtgaatgcatcaggtgatgatgttttagctaagaaaccgaagaagtctgtggtggctaagaccattgtgtggcaggaaataattgagattgagtcagccacagacacagacacagatgaagttggtggtaaaacgttgtctctttgtggtaaagtggatgcatccggggatgatcttttagctagagatggcaaaaccaaaagaaccaacctgcagattgtttgtgttgatgattgcgattccggtttggttcatgatttggaatataaaaagtacttggcacattttagtgaaacgcggaatgtatatttgcttgaggacaatgtaaggggtagttctccagtgcgtataatgtatcatgaagcacctgacaggagtttaagaaaagcagtagaaaccgagaagagtaaagcagggagaaagccaaagtctcctaccatttccagtgtatctaagaggttgaagactgaggatggtagagcagatcataagtcgatttcgaggactgtcttaaggaccaaagaaacccagcaaaagaaaggagatgatgttcgacgtggaaggagctctatcgaagtaaagcctagaagttatgtcagagacaccaaagaacggaacggagatgctcgacgtggaaggaagatttctgtggccaagaacactatcgaatcaaagcctacaagatatgtcagagactctcaagaaaagaatacgagaaatgatgagtctcagacaattttcagagcttcaaagagactgaagactgagattgggagagcagatcataactcgatttcaaagactaacccagtggttaaaaccaaagatattcaacgaaagaaccgagaggctttgcggggaaggaagatccatgtgaccaagcacaataatgaatcgaaatctagaggtcatgtcatagacaacttatttcacagtttcaaaccttccaagaaggagaatgaaatgagcttatcgtcagtggaaaaaagctattcatattacacagcttttctaagaaactccataagaaattccgttaccatcttcaattcgggacaacaagtgaaacctatgaaagatgcagtgtgtttgtctgatcctgatattattgcagtcagtaatcacccctttccggatggaggcaaatccccatttgaggcaacaaaagacggcaaagtgatagtatgaataccttcactctctcactactattttgaaatctgtcttttctgattctttctaattttctatgttgacatttttcattttgttatactgtgttccaaggatctggaagatggtattaaacctgatgatatattcaactcttcgtttagcaagaagctaatggaaattctcagaaatccctacgatgaaaaggaattcttgagactctataatgaagcatcagtcaagagaccgttgactaagtccaggcaattacgagatggaagagagattgaatattattgtgacgaccagtttgccctttcatatctcgaaaagtatacaggtacattaattgaaacgacttgttaaatgtgttcttgtggacgtgtgttgtgttgaactatctcaaagataaccgtttagcgaataaataagtttgtgccctacataaaaggttagcttgagactcagtcaactaactctaagtctctagggggaagcttgttgaaggcgttcttacatttatgctaatcatacatcttcaattggatattcacacttgtttggatctgcttagtattagaatctgagtattgccaaaagtggtgtattccattcatgatactctcttggtgggatttccggtagttttacctttgctttccactgaacatatactccgattgcaaacatattgagtttactttggtttgattctgcagatttcaacaagacgtatcatcgttaccggaaggatcttcctagagctttgaacctgttgcgcggatttttcttttatttagaggtggagttttctgtttcattgatttttctttttttgctacaacatgtgcaaatcgttgtgagtgtgcattggtctcgtgaaaccctcttgttactatcaaaccttatgcattattttatcaacataacaaaatgaatgtaagagtcgtttgcgccatggattaaaatgtcttttgtaatttgcttcttttgcagaacatagttcttgaaggtgcattcaaaccctggctgcatgaaaaacgtttgacaaaatttgtgtgttgatactagagggtgcatagatattgtaggcaacaagtaacgcggcactgcactgcactgctcttaaagtacatctcaaggcttcttttaggtttcactgtattgtggtagtagtttatgaattcatgttaagacaatcagcagaacttttttttccttgctcacaattacaagcatttccatttcgtttttattaccactgctataagtatttgcccccaaaaaaagacttaacctgaaattacaaaacacaccccaaacaatttgtaatctacaattacaacactaaaaggtgagaaaggaggctaaaaagaaccccacaaatccaccacccacccatttccacagaaccctcttcatatgtacacacactacacaaatagtttcagtaaaaatgggcatttagtcgaagctcgaagaacggcttgtcctaccttttagataatcctcaacagagacaccttgctcaatgcttcccatggagattgagtcatcttcaacatcaagaagtgctaagttaaggtgtgattgcaagttagatctttggcattgctcatctttgagcatctctgactcctctgatgaactattcacttgctgcattgcccactcaagcgtgtcttcatcacctttaagtagctttaatacctgcatcattacacattcttcaagatagctacatagagctaagatgtaaaaatactagagggtaaagaaatttgacttacgatgctcattttcggtctagcttgaggactacgtcgaatacaaagagtagcagctaacgccatcctctgcatttggtcatcattattgttgttgttatcccgcaaactcgggtctaataactgagaatactttccatcatctagaattggtttggcctgtatatgaacatcatacatacttgttttcaataagagtatagaaaaagcttggttttgacttaattggtttgcagttgtacatacccacatgactagactctcttgtccctttggacatccgctgctaatcggttttcttcccgaaagtaactcgaggagaacaacgccgaatgcatacacatctatcttatcattcaccttaccatacatgaagtactctggagccaagtatctgcacaaaaacagaagattagcacaagaacattttcaagaactttcatgaaacattacccaaaacctagagtacttcatacccaaaagttcccgcgacatcagagcagattatgtgtgtcgtagatatagacgcccaccttgcaagtccaaaatcagaaagctgggaacaaggtttaatcatctttttagtattcttgcgtttttgtttcttcctctttgatatatgaaaaaccaatagaatttgttttttacctgtggctcaaaatcatcagataatagtatgtttgatgacttaacatctctgtggatgacgggttgcgaagcagtattatgcagatagtccaatgcctctgctactcccacagccactttatacctctcgctccaacaaaatgcaagcggatctttcttgtttcctgggtatgaaaccaagcatttgttagatccatgatcataataagtatccctgagttgctttaaaaggcaaagggcttgtctaaaaagtaccatgaaggttctcttcaaggcttcctcttgagagataattgtatacaagtaaaaggttatggtcttcaaagcaaaatcctaagagggagataatattcttatggtgtaatgttgtgatgatctcaatctcagccacgaagtcattcaagacatcttcggtttgcttgagaatcttcacagcaaccactcttccattggacaaacaacctctaaaaacccggctgctgcctcctttcccaataaaattatctgacatcacataagatctcttagttataaaagaggaggcttgtgaaaattcaagaactataagcgtgtcatccatatataaaggagagaaggaccaaccagcggagaaattcgatgtcactgaaacgagttccttgtacttgaaaaaccggcaagttgaagagaacctctcataaagtccctctaattcctctggcaattttcttggactattgtcaggaatagacttgttggtgatagagttgataccaaatggaacaagtgcgtttaaggttgacaaattatcttcagaagaatcataaccaagttgcttagtatccctaggaggaagcttcaaagcccattgaactaccggtatcttatgaggagtaacagattgtcctaatgtagaaacagcacgacgaagcaaaggccaacctggtctaggttcaggcaatttcctaaccaacatagttacagaaccgcctgaatcttctgaaccattcacaggcacaatctccattgctttgttgcactcatcatcatcttcactcctatcaaaatctgaagctccagacaactttccaggagtagttgtatcgttcggagacaaagaatcaaaaccacaaaccgagcaattctccaaacgagcagccgctaagacttgccgtagattctggccacaggcttgatcctcctcctcctccttagagttagaatcttcctcagaatggctaactactttagtagtcttattcaatgtaacagatctctgaagcacattcaacaaagtaatcctccgaacatcttcctttcctatataaccaaacccaataacagtttcttcaaccactaacaccaaaaacaaatcattcagatacaaaataatgtagaaacttgaagaaaaaaggtcaaaccttgagattgattaatggtagatgatggagaaccttccttttggaacaagattttaccattgtttacagcaataacccaacaatcctttgatagtttcttcgctatgtacttagctacagaagctgatgaacgaatcgcgtggtgactttttgaaatcccaactaaaactttcgttgcagaaaacgatttcgcttccctaactaaaatctttcgagcagaggaaccacgacatagcttcagcttcagatccacctataaagcggaaaaattcaacatttcgtttctcttctgaagaagctaaagaagtaagcaaactagcaaaggaacaaaattgaaaaaatccagactttgatcttattttacctgtttcaaattgcagaaaccttcataaacgtcaagaacagagtcgaaagttctaaccagagagagaagcgaagagttccctgcgcgatccacaatctctaaacaaaacccaaaaccgaaacttttgtgttaacaaaaacataaaaatcaaagctttttggtaagagaaattatattaaggaaaagctcagaaatgtaaccatttccaaggatatgaagagcgatcacagtatcaccaggctcagcgactttaaccagagcccaagtgagtaactctctgctcggagcgtcaagcttcacgccgacaagaatcgtacggccaccacatccttcctcgacggagctctgtttatctccgccggtttctatcatctctgattgttctgaattttgatttcaagtgtgtccttttatcctcctgacgtgtgcttcacaaagacaaaagaacatcgtttttaaggatttatataaccaaacaaagacaagatctttctctctctctctatctacctgcagagacttaagttttaaccgcaggtttggttttgcttttgcttttgatgctctcgtcgtcacaaagaaagagaagagcagccatcttattagattttcattttcctttttcttaaaaccccacttgtacttcttttttttaactcgcttttttgtaaattcatttgttttgcaattttgacatagtcttactatggcattgaatcacaatgacagatacagttatgttcttattaatttgctaaggttaataaattatcaaaacttaaatgtctctgctttctcctgaaaagccgtacaaaactactatgtatgtggaaatagttggaacgttgattgtatggttcagttccctactttagagcttaaactactttaatcattatgctaaaatagtttagattaaaaatatatatattgtttttacagcaaaaaatcatctatttaagctaaaaacagattcctcaaaaatagtatggagaatatattgtttggctaaaaaaaagccaaaacaagaaataatacgacaatagaaagatacaatgtttgcaactattttgttgactaaaatgaagtcaaaatatgtatcaaaaatcttttttaaaaggaaattatagaaaaattaccctatataattttggagcattgacttaaatatatatacagtttcacattgttacaaaaatgtggaagttttataatagaaaatacaattattgaaatgaaatggtaactaatagggaaaaaaatctggctgatatcagaatgggtcggtgtaaataaagcccgttttgtggtttaaacatgtctggcccgaagttaaaaaaaaaaaaaaacggccatgtcatgtgatccttccaacaacctacacgtgtcaatgtcagcgtattaccacgtcatcataataacggaagatctttccgcccatgcttaccggtgcgtctggtaacgtacacaacattaattacgtaattagacggcgttaataaaagtattcgaaacgccgtttctcatgcccgaatttgttacttgtgtcatcattgttttgcccgaattacgagagagttagttattgtgtagtaacggaatacctgccgttttagtagcgagaaacgacacgtcaactaaatccgaaagccatgcgtcaccgtctacctcatcagtcatggaccctaccttctctttcttctatttccatcttacttttatttttgtttcaagcaaaataaaacaactatatattatggagtactatatattatgaaacaactaatttcaacatttttccatgttttatgtcacctagttttaggttttataggaagctggttcttttatcattggagagaaaactcaatggcatctaaaccggaccaacccgactgttttcaaatgaactcactcgaacaaaattgatttttgttcattaattaatcaaacatgactcaaaaacagagacccaataccaaaatattcaactattgagacaattttaagatacatttaatattgaagataaaactaaatgaatgtattgtttggtccatgatgatgatgaattcttgaatggcagagttgatgagaaatgaaagtggcaacaaactgagagagaggtcaaaaacattaaccggaagataaggaaatgtagactactcagttggtggcttttgtttctgccacgacaacgccactcgatctttacatatgataataagagagcatctcatttctttaatcttaattagttttttagacctaatcatttttctgtacttgtgccgtaaattcgtaattaatacatggaatcgaaagaccgtgtcccaattattcgcatgatctttgggagcctaatactttatatgttagtaacccttttattaaatgttggaatttcccttgatcttattggcttgtactaacatatatgatgatcaatttaacaaacaaacaaaacttttagattaatggaatactttaaattttccaaatattttgtgagagttgactcggtttcaaaatcaatttagatgaatggaatactttaaattatttttcaaaaatcgaatttgattttgcaaagaagcgtgaatcatgaccataatagttataaccaaaaacaaatcctgaccaaacaatagcatgtcatttaaaacgaaagagatagctacatggacatgtcacagttaggccaattcaatacaattaaatgtgaagcaaaataacgaaattaattgatatttggccactctttcattgatcaaatacccttcaatgataaaacacgtgtattatttaatggatcattaattcaaacttaagacgaaatgaccatggacactagctagtctaaaatatctacattaaatataatactactacttgacatacataaaccatcaatcaaataaaaactcgattttgatttatgacagaaaaagaaaaagaaaagagttaatctaagatatgtaaaggagttttgtaattttatgttttacaaaactagatgcagcctgtagataaattcaactctcttcactatacaaaaccattagtaacacaaatgagtaatgactaagatatatgaacgaatttgcaacatgcatgacgttgatgtttctctaactagcttgttcatgaaagtcttgaaaaactcgtttttttgttttgtttgggtaaatgattacttttggacctactataattgtttttcttgggcgaaaaatgagtagaaaggaagacacaatcttggttacaacataaaagttcttaaattcaatagatttatgatgaatgtgacctttgtaatatttttggctagttacgtgtcacatatttggatgctctttatttattgtcccttctgttttagaggttggtattatttttggtccatgcacgtcaattatatgttattattatataagtatatttctttttttttcagtcgttttgctatttgttataatgaatatccatcgtactcaaaacattttacgagaaatctttcaattaaataatttctgctgaattttatataactgtcaatgccaaagtgggcttataaattatgactaaaattgggccagattcaatatcttacacgaactctctcgacaatcatttttaggcccaaagagaggagtatttcattcgcgttatataatcaatagacctttagacacaatcttgcttgcttacaacataaaagttcttagattcaatatacctttaacttaatcattttttattctagacctacaacataaaagttcttaaattcaatagatttactttatatgaaattatcttttaggaaataaatttaaggtatggtgtaaaagtattactatacttgtaaccactaaaaaaaccttctaaaattagatatatcatttttatcctttccaaaaaatgaaagaaaaaaactgacactttggatgcaataatagagccaataatttgggtgtatgtaaaaaagaaaaagaaatggaaagacagatatatccttgagggacactgtgatccttaaaagcatttgactttgacggatagttgaccagagtcacgtggcaacatctgagagcgagtacacatgtacatctacgtaagcagtggagaattagatactctcgcactttcctaatttttttttttttttcaggccaaatctagctgtaatagtatttgtctcccttcagaaaaaaaaaacttctatagaaatcttcaattcgagaaactaactagacgaaggtttctctttttcgtctagatttgattcagttcttgatctcgtctttctttctcgaaggtgttgttcagttttattgggtatgtcttgtcatatttcgtcagttcttgtctttgcttgcttcaatctctgtttgacgctgttctgttctgttatgttttatatgttttcaagctcatgtgtttgattcgattccttcattatcgtgcttcagcccctttttagtcccagatatgaatctctctttgttgaagtttcgaggtttaacagtttctcctgtaatgttaatttggtgaaatgtttgatcagttgatgactcttttttggattatatgtagttttaagttgcttgaatgtttaacccccactgctccaatgaaattagaatctgctctgtttgaataatttggtaggagccttggacaaatagttggagagaactggtctgaaacaatgcagttatatcaccatccttactcaatagacagccaaagagtgagactagctttggaagagaaaggcattgattacacatcataccatgtcaatcccatcacaggcaagcacatggacccttccttctttaggatgaatcccaacgccaaacttcccgttttcaggaatggttctcacatcattttggacactattgagatcatagagtatgttactcaccattgataatattctcccttctggtcatagatattttggttataagtagtaattaaagctttttgttgggtcttgaattttctaggtacttagagagaatagctgaagtttcctctggtatagaagatgctacttttaatagagaagttgttgaatggatgcggaagattagggaatgggagtccaaacttttcactcttgctcacataccggataatcgtcgcctctatgtttccaagttcttgaggatggtagtgattgcaaggatggctgagtctccagacttagctagtgcttaccataggaagctaagggaagcatacgatacagaagacaaactaaaagaccctggggccttaaggagaagcaaagaccatttgcttaggcttctagatgaggttgaaacaaagctagaggggacaacctatttggctgggaatgagtttagtatggctgatgtaatgctaatcccggtgctagctcggttatcgctcttggatttggaagaggagtatataagtagcaggaagaatcttgctgagtattgggctcttgtgaggaggcggccaagttacaagaaggtaattggaaggtacttcaatggctggagaaaatatgcaacacttgtaaaaacttggatgtttgttagagtcagaagtttactcagaaaatattgaatatcaaaagtttgccttgtttcttttccaccttttcattttccaggagatgcttaagaaaattaattatttcagaagttttaagatgcaaagatctcaaggtaacttaaaaagattaaagaatgtgattgcttttacattgaaatgggactttttgattgtaaaagaatttagaatatactaaagaaaggagagggataggaaagaaacgcatatgactcccctagaggggattgattttcctatgggccaaataaaccaatcaatcactgtaattctcctttaagagatgcattgtctccatttcaacttcatcgactgtacttctctaaaattaagaatacttaactgttgagcttcttctctaaagttagatttccaggtatagggctgtttgctgttttctcccccccattgttccgcaaccatggaggaacactctgtttctgttgccgaaagtaagttgtccctatatcagatgaaaacaactctctcttacgggttggagcggtcgagtcagtcacaggtgtagctggtaagatctcattggagtaagtcaggtttcccatggacgaggaacaggctcttacgtttctcttagcaaaaaactcaccatgagacactggcggtagaggtggaaatggatagaacggcatgccaggagcaacagaccaggtggtcgggtcctctttgccaggtgaaccaaattgatgaacaatgctaagtggaatcccataggaaactggtaagcgagaaaggaacttttgttgcggctgtgcagtaattgcatcaggcacatctgtgcagggtgatgaaaacccgggtggaaggtcatcttggacatcctgatttccattagtttcatctgtttgttgggacaagatagtcatgattctttgttcttttgtcttagacggctggtcccatctgcttttgcgcttgcgtccatttgtctcaggaagaccggaattaggttctgaatatccctcagatacagatgctgtttcaggagttgcagcctttgatgatgtgacagacgcagctggttctgcaggtcttggggactgatgatcatatcgaggttcttgtgatgctctgaaccttctgtttataggtgacctcatagactccgatctctcctccctgttgatgcgccaaggttttctaaaatgcttaggtatccatctgtctcggaagctccgcgcaatattatgaacctgcatacacatgaaaataattggaaattaaaagccaaacctagatactcatctgttcaaggtccaaaaatacggatcactaaaacaaagtaaaagggatgcctggtaccgtatagtcgtcatgctcggtgaatgatagaacagagtccttaaagctgcaggtagataaacatttcaatgtcatattgtgtcctacaagaacctaaagaactaagaaggtgtaaaagcaaggttcgatgaagacagatgaaactatttttggagccaggtgacagttcaaatttctagtaagttacatagagaaccagattagtatgaaaaggtaaagcaatttactagacagccaaatttcaacaactatactagtgacagcataatttcttttcaattgtttgatatgttagttcccactcgataaggataagaatcaatatctggtcggatgactagcaaaggtggccatgattaaactttactgacctttccatccctgcaaaaggaggccttctgattatatgctccagtgcaaggattttccttgtggcaagatactctaatacctgaaagtaaattcagttatattgacatgtaagcaagctaaaaaatttcaaggaagtatcagctaggaaagttaattcgaaatttcagctattcacattgcctaagatgtaagcggaactgcctatgggtttgaagtatcattaaccaacgtggtgagacgacaaatttaaagatagccaatgccaagtgtgttctgcccattatataaccagaagcagtaggttaaaaggaatataccttcagaagtttccggattatagggatccttttaaaatcaccccggtattgtttcatgatattatgtaacatttgcagacctggatgtgtttaggggttatttcactttacgagagaaggaaagttcacaagataaaaaaaacagataagaaacatggaccaaactagaagaagactgtcataccattcttgttgattatgtccactaaaacagattttgactttgtcttcaaaagggcatcaagaatcattgaaagatctcgattgctgcgataggttcacaaacaacaggaattcaggcacaggatgcagaatatgataaatctagaaatgggaacaaagataagcagaggtcagattcttgaatacctataaattccttcttcatccgtgcctcgcgaagcggcagtgagcagcagaagtttcaagtagccttttgctgaatcctgtttgtgtaagaaaagaaaaccaactaagtatgcacgctgcggttgctcgataaaggggaagtattaagaataaagagagttatgccaaggatgtatcaaggaaaaaaaagtgcatgatcttacaaaccccacaaaagaaaacagaacggaacaaaatatgatgtcttaaccttacaaacataactaattgaagtgtagactaaggagcaatgctatatacaacttaccctccgcttgcttatccctcctacggcatctagtaactcgttcagtttcccttcaactgcaaaattggtggtgctattagcgaatatggctgaatggtgatggtatcttaacaattcacgtctaaaactagtacattacatgtttcgatactgggagaaactttctctgatcctttagatttgatgggctgctgttgcaacttattaactggtataacctgtgctttgttaacaccaggataaatacctcctttgtctcgcttactagactcagatgagcgagaagttttcatacgaggacgaggacgtggaagtatctttttatcttctcctgatccatgctttgtcgtcttatcagaatttgtaccacccggggacattctgctaagagaactggacgtgggagatgtgcttttagtcttcttttcagcgggaacctcttgctggacagcagtaatagatatgcctgacgaaagttccttcaaaacttcagttggctgaagaagaggtggaggaatttctctctctggaagttttacagatactgagctctgtgtttgggtattatcaggagcaaggtccttgtaaccattaaccttttcaaagctctgtggcatttgctcgtcagcgtcatcagtgaaggtcctagatgttgcacctaagattccttctccactttcatcatcatcaaggatcacaagttcaggatactcttcatctgaatcactttgaataattacatcaccattcagaggatctcccccaatataccctctgcaatgtgatgatccacaatagcactttttggcggcagcaccaaaaaccctcacatagttgtagtcaaatgtcaactcttgaccctgtgaacgaaccagacagattaaaaactactgaaatgatactcgcagaatagcaagtgcaggagagcctaccttcttaaggtcttgcatggagaatattccaacgcaaatttcaccattcaccatccactgcaacaacatttaagaagtaacaaatgaagcagacgagctcaaaaagaaagttcccgactcagattactgaatttataatcagacccgatgaatgatatcgcacagaacactttgtagtcaccttttcagtacggcagtttggttcacagctatggttaatgaaacgccctaggtttccctttgcaccagcatctattacctgcgttaaaaaaattaaagaagttattgcaaggtccaatttagagcatattctaaagtatgcacaaaaaggggaaaatttcaaccgagtgcagataatatgctagggatgcgattattacaaacaagtaacctatctgtgcataggcaagttagataaatgtccaaaaccctcataagcttttgcgctaaactagttgggacattttaatctgttacctttaaagcttacataaagatagatactgataaagatacagacgagtgtcagatgaaggaagatacagagagaagaagactgtctattcatcttactcttgcaaatgtcttttttcttttttgggtacacatggatcaaataagagacataaaagtaactaacccgagctacaagcaaattgctcaagcagaaaaggtttaaaaagatagaacttcatatatgctatctaaaatcaaaaacgcgacacggtctggcaaccatacatcacttttagtatccatcacacatttttatacaacaactccacacagctttaaacagcaaattacaaaccattttaatcaaagatgaagaaaaagaagcagctgagtcattaaaagagaagatgattacctcattcccatttagtgtcatgaaatagaaatgtttctgacccttgaaagcatattctttttggcgagtctcataggattgcatatcaagcacctgttataaataaacacaagttatacgcatgtattaataaaacacacagataaggaaaaaaatagaggctgaaaaagccaatctacagttgatcacatccaccaagagttgaaagatcatttcaaacacacctctccaacatattcaattaggaattgcccctctcgtacatcctcgagcaatctcaggccataacccttcttaccggattggaatctctcaaacttaacatacttccgtttttgaaactgcagaaatatgagccaaaagattgagaatgatataactgactgtgaatgtaaccctttcgcttgcaaacaagacattatacctgctgatttgaacacaaatcgccagctggacaggtaccttgaagacattcaatgttaagcattctattgaggcattcttctccacaacccaacctaccatcaggtgatggtttgcagtgacaaaccattatctgtccaaaatagaagggaacacgatagctgagtagtaatatagaaaaggaaaaaatagtgacagcacaagtacaatttctactaatgcattactgacataacaaataggcaaaatacaaagaaattaacctcgtcaattgtttgagatttacgattgcgatgaaggaactggtttgtttttatagccttgaagcacgccttttgcttacctgcaaaaattacggacataaaaacagattaaaaataaacagatggaaaatcatatgataattcaaatattctagccaagggtactctcaaggttcccccatgttgaattataagaacctgtcaaacgcttgctcttctgttccttttctttccctcttttagccgcatcacaatcatatgcatctgcttcatcctgtcctatgcccaactcttcattaatttcttcatttgacatctcttgagattttgagcaatccgcaaatcttttatctgagttgttcatacagatccttttaacaatagaaaatccatattagtatagagaaagacttcaacatatcacaaaagatgaatgaagcagcacgtgcggaaaggataaaaaatcatgggtcaaacagctgcggacaggaagtccaaatgtgatgaatcaaaaagatgaaaaaactccatgctgattataaatttgagactcaatagataaactaggttaactttgatacaagtgcgacgaacactaagttaacacaaattttgtatagcccaacaggactaactatgatccgcaacacactggaaactgttgataaaaagaataatctacaagaattcgtaaggggaaactacaaacaattagccagaacagtgtgtggccgagatgaggagacgctaattttaaggctaaacaagcaaatttcatgaacttaagtaatcaaatacgaaggcactgtccagtaaaagctggccacattcatccccaattatgatcacatgacaaagtaaacgaaaactaaaagaggagaacacttagaaaaacacaatcatcaaaaaatttaattaaagcaagctcatattcaatataaaatgatacataccatctagagctctcgtcaattgatcctacaacagaagcaggtattcgtcgccatttaaagcaatcatcacatcgaacccaggcactctctgtggaatagctatcttcaatagtaacatccacaaccatttccccatgggtcacatctgatgatatggtaccataagtggcactggttttcccaatatcagcatctagaagggcacctattacatgattcacataattcacagcttaaaaatgtttcaaaagattggaagcatcataaagaaatggaaaacattgagattctattcaacttcacgtaagcaaaaaatagtgtcctcaaatttttgggaaacaagaaaggtgttgaacatggacaataattcttagagctaattaaaagagtagtacctgttgttttgtgagactctattctccctacttcaggataatcactatcatcccttcccatactggtattcagggatttgcgttgctctaccccttcatgtgattcattttttctcccgtctttggcagattcggaaaacttggatttacctttctttgttccattacttttagacttcggatgtttagctttttttgcattgggaattagatgtgaaccattttctgaaggagattttgaagcacgcaattcatcttctttttctaatactctgttcttcttgaccacatcttctggagtgctaaaaaaaccatgatgcagaccctctttatgttcaatattgacaatggaatcaggcacagagttgataacttcagaatctggtgaagtttcagcgtccagggactgcgttccagtggccctctcgcactcctcaaccattctaatagaggaaaggtgtgggtcatcatctaaaacatcaccacccaccttcctacataaacccccagcgtcttggttatatttcttatccctcatagaatcagatgactgaagatatgaaactttctccacagggttgcttttctctaccaagtcctctttagtttccacagtttgcattttatcctcaccaaaatgtgctgatcctggcaattctaaacatgttcctgcttttacaataccattaccaggtaaggagttaccactgaccttagagactgtaatgttcagaggattttggccacctgatttaccaaatttaactttcaaacgaaggcaagagccacttgatgcttggatgtttctgttagatccttctacattcccgttatgagaacttctattatgctctccattattaagatttccctgagatctctgtggttcatgatgcggaggtccatcatagggaatattattgctctgtaagaagatttcagtggtcttgcttggtaatccccactcagatgaacgacttgtttttaaaagagagctcctcttctgctttgagcacttgaaaattgactcaatgtctctttctgattgtttctttctagaggattttctcagatggcgagcactcgtttttgtctgcaccactttacattgtttcccgtctcgggccttccttcgggaagaagacatgccagcttcacaaaaatcactccctgatgcagaagcaacttcaccacctattctgccattgtcatctactattctgagtggctcaactgcattttcaggattacagacttcgattcctccacttccaaagttcaatggaaaattccatatcaaagaagagtcagtaataggggaattggcttccatatctaaagttttttcgtctatgggtgaactctgactgaaattttcagctctcagatcagcagccataccattattcatactcaaagcggccacggcactttcacttgatgaatccccaacatggttttttagcatcttttcattcatcacggaaagatcagtgtcaagcctatcctcacgtaccaacttcaaatctggattgatcgtctctgtgactgtgatcttgttaagatcatgtgaacataggccaccatcatcattatttaacatttctgtgatagctaatgaaggggatacaacaatagtcccattgccttcaatatcaattgcatcctccagataactttctgtggcgctacagccaaatacactagagtccaataacgaatctggaaacgaaaaactctgactgagagatatatcatcagaagaaccagtatctagatcactcgatggtccatttcttccttccttacctccatcatcaaacctataactaataccatcactttcaacttcatcaggttttatgtgctttgtggtttccaaagactcgaattgttctggtgcatcattcacaaaagttgattccgtatctattccactgccccctataggcaatgttgtgccaccataaccttcatcttctttagcctgaggagcttctttctcttgcatactcccagaaaaaatggatacaagggacacatttgtgtcctgactttcctttccatcatccagcttgttgcaatttaccagtaaatcagtatcacaaattaattcttgactttgttcaagctcacctgaaaccactccctgctcctgagtgtcatcagcattgtaacaaacatatagatcatcatcagtgtttccagcatcttcttgactattactgttcccgtatcccatctgctcaatctctgtaaagcacttcctttggccttcaatcgtatggtttacagatgaagcagtctgaggaatctccaaactactgactgaatctaaattttgcccacgagaactcaatttctcatagaaatcttcattggtattcatcgcaagatttgaggccagagagttagcatcaatattgcacccagaagcgtcaccaacaccgttttccttacagtccatcgtaatgctacctgattcaaagccaaacaaataacattctcaaaaaaagggatttttaatgaaaaatcagtaagctatttagtaaatcaaactatgcaatggttcaaagacctttaacagattctcaatagaacccagccccgtattaacatgatctacaaaatcaaccaaacagagaccccaaaaaaaaaaaaaaaaaaaacttaagaaggtcaactcaaagacctaacacaagacaatggatggctcaatcatcaacattgatgacaaaaaccctccgatctcttctgattttaaacacgccgcaacagagactaaataaaataaaataaaatcttgtcacctcctgaaaataacgaaaccctaacctcatgaatcagaagcgattgagcgaatgccaacgaacgtaaaactggagcacgagtaacggagaaaaccctagagaggcggagaagattacgatatcagatatagagagaggagaaggaatcggaggaagtagggaagagacaacgcgaggcggtcagttttttcagagataccgattttttttttttctctttttcagtaaaataaattgtaaaatccccaaacgatactattttgctattcccaacttatatttttttgttgttgctaatttgtttgatttggacttgtgtgggtcttagtttttttattttattttaatctcaatgattacgatgaaaatttaattgacaaacaaaaaaatatttatatttttcgataaagtcataggttttttaaatcttacccaaacatatgtcaaaacaataaaagttagaacttttttgtagagaaaattcacacaagcttttactaaaaatacattgccaatttatttccaagatattcagatctattggggagttgtgttcaatcaaaatggtcccaaaggtggtccataaagacatgattagtcgtttaattagcttctttagtctatgattacttgattagtcgttcgttctaataagattctcgctagtattcttccataatggtttatcattagaaaaaagaaatatatattgtatgtgtatatcagaataaaagttcatgtaataactttagtctaccaaacctagctagttgtattattattttacaataagactcacacagccccactcattcgcaatcataacatcggcggagactttcgcgaccaagcaagcgggaataagtttcatagctccagacaacgatggttaactgacttgtgttctcctcgttgaagatgcaaataagtgcgatgatgatgagccaagcatttatccgaatcagagtcttgttaacgatattgagtcacggtttgaatgtgaccaaacccttgctatgatccctgtcattagaagccaaaaacgtggaagctaaggggaggatattcatacacgaagtcgcagtatttcttcttgttgtccacctcatccacttcatcttctcatccatatcatatatgtcgtcggacaccgtccatattgaagatgaatgagcagttgcggcggaacttagaggttggagactatgtcgactttataagagatcaaagaagcatcacaataaaagagagagcagaagagtatcgccatgatccctgggaagcgtggaactgcaagggtgttatataggcttatagtgttgtagttgttgataattactatattttgatgtttgcattactgtctgtctatatggagccatggaggtgatatcataatccaagggagaattaagagctaagagaaaaacttatgctatcatctagctacacatgatgcataaaatctgtgcctaattcatagttttgataatatggaaaccaaggaatgctttgatatatgacaataagctatggatcatcattccattgctaaaaaaagagagaaaaacaatggagttgagaacaaaaatatgagatgcgggaattgaactaatcaagttataatctacttgtacacataaccatgtcccactcacttctctcaacgcacttttggatgcatcttggaaatatgagaacaaaccatacgaacactaaaactaattgtttcgcttttgtatgatcaacaaaacagacttgtagtttggagttgatgtagtcttactgtaatgccgtctctcggtattgacctattccgacgcagtttcctcaagaacaatattaatgcaaaaagcaacaattctaaggcaaatacataagcaaggcaagcaaaataaaattgttgtctcttcgaatttcttagaataacttatgtaacaactcctcgttacttgatgtttcattaattaacggacaaaacaaagaatgacacatgatattttcataattaattaaacatattaccacatccacttttatgaaaccaaaagcttaataaaaacattatttaacctctaacaaattttaatttattttatagacaaaatagacacttttttctcttgaaaagtgattcttaggattctctcatatttagtcattttaattttttgaaaaattgaaacctaaatatgtttgtttacatttaatttgcactaaaaaaacaaaaatcattttccgagagacagaaaaaaataaatagtaataattaaaacctgtttacgaggaggagaaaaaataaaataaaagaaaataaataaaagcttaagaagcgtctcattgctggatatcccgcgcaacgttgtaacaaaaatcgtcctctcagttccaatctctctcagattctcctcctcatcacaattccccactcctttgattcttgtcccagagtcacgtcctctcctattcgggtctctacagagtctaactctgacccgacccgacccaattcactaaatggaggacgaaccaaagctcccaaccgatgacggtccaactttcaacgaatcgtgtaaaatctcgtctgagatattgaccgccggtgatcggaaattacttaaagttgaactcctcaaagaggagaccacgctcgtatcgtggaagaagcttatggatgaggctagcaaagaaaacggcggcttgttcgtttcggctcccgaacggcttcttaatgccaaccctaacctcgagtttcgccttgcaccggtgagttcttagctgcctacatgcatattctcatgtattcatttctctgtctctgttagaccaatttttgtattgtatcatcattccgggagctgaattgggaaatttctccttgacattgagtttagagctagggtttcaataaactaactcttgaaaatgaaacaaaactaaagctgtatagtgatttcaatgtggatactgatcattgtctaatgatttagcgatatatcgaatgcagggggcacaaacagagaatgaaatggtgaatcaacctcatcctaatcgtcttaactctgttatagccaagattgagagactttatatggtaccttttcttactactgtttctattgattatctgaacaagtaagatgaatgtttgatttcttattcggaacatttttcataccatgcattagcactggttttgcaacagatttctgattagcgtatacttcataaaataaatttcagggtaaagacggtagtgatggggaagagttagacggtgctcctgacgatgatgactatgacactgaagattcatttatcgatgatgctgaattggttagtgtagatatcctgactatggctttcttatgtgatcaaagtgtatcttgatagctgagacatccttctttctttctttcttttttcccattgtaggatgagtattttgaagttgataattcgccaattaaacatgatggattttttgtcaatagaggaaagttagaacgaatgtaagttttttgtcctctttttgttgtatgttgtcgcatttctctatggcaggtttgtcagttttcatttggtgatatgttgtggagaataggctatgggcagcataagtgtgtgaacatatatttggcatcaccgttctcttccctctaattaggtttatgcaatgtttactcagggcagaaatatttgatagaattttcttgataatattgctacttctctgctaacatatctaggttatggtcaaaacgcaatgaatattttgtatcgttgtggtctctgattataaataggattcaggtttccctgtttccttatgagtaggttatcttccattaccattcttaccagtttatctaaattgtgtttccttcctacaacagtgaaccttcagctacatcgaaccagcagcaaccaaagaaaaggcgaaggaaggagtcagcaaaaccttgtggcgatgttgttgatgtatccagaaaacgagccaagatggctaagacggctgggggaaaggtacattacttgcaaataactttttgaatctattttagagttccattccagacagttgattatttgaatgtgaaagtccaggatcaatctgcttctcctgggccctcttcgaagaaaatttccaatgattcaaagacggtgcaagattcgttttcccctttgaaagcgcaaaatggcaatgattccttagttttggaaaatgtgaagcatactgataaagcgaatcaccagccaatgaatgccacgagtccgaagtcaaaggcagctggatcttctggcccccttcatccgaagtgcagcagcaaaagtgttcatgaacaatctaattcccctccaggaaaatctcggccaaatgtttcggcaaaatcagcagtagttcgtcagcaagttaacaatggcatgcctgacctggacattgcaacggaaagcaaaacatctattcaaatatctgtaagtactttccagctatcttaagtttattagattcctcattttagttagtttggaatttgaagtaagcatgtatttggggctttcatcttctacatccaagagtgatgcttctctaatctttgagactgtagaaatgatctgtaattgtaaagatattagcatttaattaggagagttcacgcattagatggcttctatctgtaattagttttcatctcgactctgggttgatctttctggctaatatttgcttccatgctttactcttgcatatcttacaatctgtactcaattttttatttttggaatggagcccccatggtatttacattagattgctctttacctttctctatttagaaaaaaagcggttcaaatggccggcctaaatactcgacacttgagaaagccatcaggaatttggagaagttggtcgctgaatgtgagtttcaactgtttcgttgttctctacatgcatgagaagctaaataccatttagtaaactatcatatccaatttattgcagcaaggcctcctgctgccactgagaatcaagatgccgatatctcttcccaagcagtgaagaggggattgccaggagatgtaaaattgcatcttgctaaagttgctagaatcgcggtaatcaaactcttctgtttctaaatatgtatataaattttaataatctttcagatgtatgaagaagagtagcaattttcttttcttgaagtatgcgagccaaggtgaaatatcaggagagttaatcaatcgtctcatgggcattgtcggtcatctaatacagattagatcacttaaggtattcatctctatctcctgcataccgagacttgttatcgtaatggagttgtgattcttactgaggcattaaagtatttagattttttcgatttaaggtgaaagctcttccattccagaaagagctaacaagatctgtatttgttagtgaaggagttcaagctcttacggtttagtaattgttattgtacagaggaacttgaaaatcatgattgattcgatcgtcactgcaaatcgagaaaaagatactagatttcagcggatcaagagtgaaataactgagatgttaaaaacacaagttccacttgtggaatcccaggttctctcccttctactctactagtttctctgatctgattttcaaaagtatttcgtatctgctatgttgcatagatacttttgttcttgtctttattgttggatttaaacatcttctttcgatgatgcacgaaactcagagttctctctgattatgattggccttggataagcacttatatctcccttttattgagacattgataaacatctgatattttgaaatattccttgcgctgacataaattgtttcacaggaaacaaatcaagaagctggaacatcagacgattttcaggatgttggatctcttggaaagtcacctgtgaagaagtttgtcatggatgtggcgctggaggaaaaattgtgtgatctatatgacgtgtttgttgaggtaattaatattttccataaccttacataaaaaggtgttccaacttgttagatgcagaattgtaagtgtcaacatagtttttgctctgtttttggtaatactagggaatggatgaacattcaggttcacaaatcagaaagctt

SEQ ID NO: 140 - DNA, 110565 bp, Arabidopsis thaliana
gaattcaatagtgcttgatcagaaagttcatcatgggaaaagttcagttattccttctggtatgttttaacttttcactaattttttttcttccatatcccatatagttgtcctataagcttctggtccgatgtttattagagttaatttaatattttttattcctttcttagttgatgatagctgctgctgaacttgtttctaatcttttgagtagatgatcatggagaacaatcaaactccagttcttctggagtcatgatggagaatgccttttccttgaggccaaatagttctcagaatcgtggaaatttgaactgtccaaaccccattatcttggatctcttgtaagcgccagaaatgcaattgttagacagtttctgttgttctctcggctaacataaatatcctgtcttctaaatcatttttttaatatatgatcatgcagcaatcaggaagcatatcctggtttcaatcctcatcgttatatccacaaagaattgtcagaacttggcaaggaacaaaccctgaaaagcagcacggattctgatgtggctaggatgacaaccaattttgatggtatagacttaatgattcatgccacaacttttaggacatttggtaacattaactcatttggcaggctctgaagaaggaaacaaacatctgcagggtgcagagacatttcttcagttatctaaagctaggaaattgggcatactggatctgtctcctgaagatgaattggaaggagaacttctatattatcagcttcagttacttggcactgcagtttcaagaaagcaactatctggtgatttgatgatccatttttaattgcatggtcccgattcttcatgttttctacactatttctgttatagtattctaatagttggtccttaacagacaatttagtctatgaagttgctaaaaagctgcctctggaaattgatgaacaacatggacgaagatgggatgatgttctggtcaacaaatatttccatgatgtcagggaagcaagaaagcaaggtaggaaagagcaaagaaacaaacaagcccaggctgttctagctgctgctactgctgcagcggcgacatcttctaggaatacatcgcttaggaaagatatgtcagaagaacctgcacaacaagaggttgttgttgctacattttgattttttgcctccatgtatttattttagttgtgccatatttcttatccattattcttactggttataaatcggacagatgagcacttctagacgtaaagttgttggcagctctcacctagttccacagacaaaggaatcacttttaaagatggctgtttctgggccaccatccgagaagcggtctgatcatcacacaccagactttttagtagaaaatccacgaacttgtgacatctgcaggcgctccgaaactatatggaacctgattgtagtgtgctctagttgcaaggtgaaagacatttcctgtgatttatttctaatgtttgatcaaggcatgatcatctcttttagggaccacttttatgcactgtacggtatataatatggctccaattacaggttgctgttcacattgattgctacaaatgtgctaaagaatctactggtccctggtactgtgagctatgtgcggagtcatcttcagaaccttctttcaattttggggaaaaaccgaattcttctacagaatgtactctgtgtggtggcacaactggggcttttaggaaaaccacaaatgggcaatgggtacatgcgttttgtgctgaggtgaagtttcctttacggcagcagttattagcaggatctggagtactatattcagtattgaacattgcaaataacttggtgtataatttctggcagtggtccttggagtcaacgttcagaaggggacaaataaatcctgtgcagggaatggtgggtttatataattattataccgaattactgtgatgcttaagctgtttaaaagtactaaagctcaatgtatggtgccttattaggagtctctggccaagaaaacggataattgttgtgtatgccaacggatatatggtgcatgcactaaggtagtcaccgtttctttacttttttttttttttatctgaatacatctatttcaagtgttgggacaaagattgaacaagaagcttatgttttgtcattttacagtgcagttatggtaactgccagacgacattccacccctcctgtgccagaagcgcgggttttcatatgactggtggtggtaaacatccgcataaggcgtactgtgagaagcacagcatggagcagaaggcaaaggtcttatctcttatctctttcgccatcttgattatggcctacttagattataagcttgcttatatctgtctgactatttctgcaggccgaatctcagaaacatggtgcagaggagctgaaaagtctcaaacattatagggtaggagttcttagcgaagtcaaaatgtttttgccattgctttgttaagcgtattcctttctatctcttatcaagtaatttataattcttggaattttgctaaatctcctccaggttgaacttgagaggttacgccttctgtgcgagcggatagtcaagagggagaaattaaaggtatatgttaaactacagaataaacccaaaattttccatttattgaacgaaacacatgggggtttgacctgttactggtttggtatatttgcagcgagagttggctatttcctcacatgaaatacttgctgccaaaagggatcatgctgcacggccattacatgtccgtaatccattttctcctccagaagtttcgtcggactcagctacaacatcaataaaaggccatcctgatagtaatatatctggcagtgaagcaatacagaggtcagatgatatcactattgacagcacagtcactgataagcgcagaggcaaaggtcccttattaatggacacggatcagaaaactgatgacagtgctacttccaagagtcggttttcccgtaaactaacagaaagacagatcttatctgggaaaactgttccccgcaaacattgtatagtgtcacctagtgtttcagaggatggagataacgggtcaaagcccaagaaggtgagaagattaactttgtcgtaagttacatggattgttaagttccgactctttctgtgcccccaactcagcacattcataggatcttacacttgtttgtcttgataactgataatagcagcatgtagaaacatttgcaaaagagctggtgatgacatcagatgaagcttctttcaagaaccggcggctcccaaagggatacttctatgttcctgttgattgtcttcaggaagacaaaccgggaaaccagaagctggcttcatctgacaagccagcgaaccagaagacatcttcaggtgatcagtcaggtaaagacgacgggtaaaagctgagaacacacattttggctcattgctcctaccttaattagatactggctattggtggacattgtcttctgcgccctaaccaggattcaccaactggcttaaagcaaaagaacagatggtattgcgctacaaaagagctgtggctgcaactgagaatcagctaaaaaaagctattgtgaagcttttgggtactcgatacaaactgtgcctattggtaatgtttgagatttgagggtaacatctctataggaaaaaggcttcagattggattcagggaagtgagaaaaaagctccctattaccatataaagaaggatcggtcacgtgtaattctgtttgtataaagaagcggaaaaaaaagaaaagggttgcataagtgtatatattcatcaattgtgtctaaaatctgaccaagggaataatagttgtctgaaaattctttagttatgcattttttagctcatttgcccttttgtccaagattatactaacatgatctaactcaagtagaagaaacaacaaagccaatcacacaacaacaactaagcaaatatattctcaagtatatgatttgtatacctttggttcttctttacaaaatttgccttctcctctcttgctctctctttccctttcttgtagcagtctatcaaagttatgtttagtattggaaccacttggctgattgggaactgaaatgatcttttacagaagcgtattccaaacagctccttctccttcactacaaacttcatgcactatcttcattctctctacggacttgcaaatcccactacagctccattcgaatgaggccacacaaacatcgcccgcctctgccttccatctacaatctgtgagtatgtgaatccaatggaacataaccattagaagcaagagagataagaggaagattgctttgtgtgatgttattgagctttacctggaggagtcccacaacagaagttgcggtcatcaatatgttcaacctcaagaccgataaaccatgaccctaaagacacatcttcattggcatacttatgcaaaattggcctgcatacaaagttgtaaaccttttaggacaaacatttgatggaaggctctttatgaaaaggatgcagaagtacgtactggttgatggatatgtaattagcaagatccttggagatggcatagatctgtcctgtagcatgtcgaaagtatttgttaccatcctctccaaatttccaatactcaggttcatggtactttactgtcctgaaacagttcaataaactaactcaacaataatctaaccagtaaaaccagagaaactttaagcttgactcaagcaaatggaattacttctgagcaagaacaggccctgacttcatacaaccaatataaaccctcggctttgagcggtgacgggcaagtgtggaagcaagcatacctgaaagacaaagtttttcattgctcccattgaaggagattgatgcaaacaaaagaatcgagaagcaggttttcttaccgagattgacgtgaacatcatcatctaccttgatatagaactctgcatcccatttggctactgcagtggaaaagaatatcttggtttttgctgagagttcgtgatatccttcaacatgctcctgcaaccagtaagaattttaaacaggaagaaaagtgaaaaactgtatcctttcatagaaatatagaatcgtctcaccagcctaaggaagtctttgtgttgagcatcttctgaatcaatagctctatccaatatactatttgacgtcgcactgccaccacatttgtatacactagtcaatctcaatctaagatacatgaaatttatagaatacatgaacctctgagagaaagagaggaagcttcacctgtgtccaatcatgaacttgatcacaatccccttctcctgttccagtctttcaagcttctcacctgtgaaaaatccacagctcttaactagatgcaagaagctgtagttatataagatcattaagtttaaaacaaaaccttgaggcatccatgtttctctaactgaatcacgccgttttctactgctaaatgcggtattgattcccattaccataaacactttcttcctcgggtttgtttccgagccatcaaccatctcttgagagctccttgtagaagaaagtgtagaaactgacttatccaacgacctgtcatccctccaaagacatagaaaaaaagctacaacataaatagagaaagcaagttgatttacaagaaacaaaaaacaaactcaagattgtctcactcactgtatagcttcatgagttctcaaaacttcgccagttacatctttttcttgtgtagctttctacatttgaccaaatcagaagaagaaacataagtgtaaaaacccaaatcttggttttaacgaacactaaaaaaaacaaatatttatgaaattctacaaaattgaataaagaagcgtactttattatgagcacaatcgtcagatacaatctgaagttcatgatcacgatgatgctgtgaaattagctgacttccggaatctgacgacggctcccatgacctgacatccacaaattccaaccaattgcaacaaaagcaaaaccccattaagaaaaatcaaacagcaaaaaaaaaaaaaggcagaacaagaagaaggatagagtctgaaagattatagtaaaagagagaaagatgaaaagttagagacctggaggtgaagattgctccgagagcgaagaaagagatgcagagaaatggaacccatttcagagatattactcgtttggagactttgtgcttcatcgtggtggagaggttcaaagaagaaagagagtgtgagattagaacatgtccagatttaaaggggaaagagacacaacacaatcaagaacatttcattcatgggatgtgagatattaaaattagtaagtttccgaacataacttttcattacaactttttgacttttatttaatgttattcacaccgtcgaaaatgccacgtcattaattttacataaaacaaattaatgattaatgggaaaacaacaaaatagaaacaaattatacagacaagaaatttcattaaatttttttatttgacaataatattcacttttttttttttttgtcatcatcttcttattgatttataaatcagcagtgtagttacaatgtatagcataggttattacattaggaacccataaatgattcagaaataaagattggttttggagaggagctttagcaagaatatcagctggagtattgtgatgtctttttatccaattgaaatggattgattcaaacttccttgaccaccaatgaatgtcccgtatccagttgtgaacgccaaaatgtaccttggatccgttaattaggttaaacagcatcttgttatctccttcaaagcaaacccgtttgtaaccatgactccaacagtgctgcattaaaatgattagcgcttgaatttcactctccagagcactctgctggaactgtcaaggactcggcatagacttgacggttcgacgcctaaaggagataaatcggaaatatctcccggacgtaatttgcctctccgaaacaaaacaacgcaatgactatgtgcgagacacgtgctgtgagttgggttttagtaactttgtaatggtcccatcaatgggtttaagtgggggtttggttgtactttggaagccttctgttcatatttctgtttctttcaattctcctaatcttgtagattgttatgttcaaagtaatgaagtgggttttaacttatcttttgtatatggtcatccaaacccaagtcatcgtaacaatctatgggaacgtcttgaaagattagcagtaaacagaaatggtcaaccatggttcatattaggagacttcaacgagttgctgggaaaccacgagaagataggtggaagaatcagaccagaagcatcttttcgacatctacgacaaatggtgagaacgtgtgattttacggaccttaataatattcactttttttttcgttacgctaacttaaaaagaaagattgtatagtaacgaccaaaatgaattaatgaaaatgataggagtcaataaatagaacaatgatggtataaaatataatactatagtttaatctttctttttttctatttttttagtaacaacaaggtctaaacgaatgtcttaattagagacgaattgtcaataaggaattttgaattgaaaagtaattagagaccgtcaaagatggttaggcggaagaatgcgtgtcgttcattgaccgcaacactcacgtcgcacgccgtgatgtgtggtttataggatttttcaggcctttattcaatccaattaggcccaattcaacacaatttaatctatttagaaaatcattaatataacacgaaacacattattatagcttctttgttctattaatgatttgctgattaactcctagagtcctagtgcagatggaattgaacctacgagaatcatgacctatgagatcatcatagattcataatctagggatcaacatacaaacaaacaaaagacttaacgaaaacttcaggaacacatggatcaagccctagaaaactagtgttcatagatcgattagccatgttttgattattgtctgttatcgatactttaataaataataggaatgttattcgatattttattcaaattcgtatatttttgtaggctctaaacgaatcagctaatttttgccaaaacattctctttcacatgatcattgcaagtaaacaataggaaaaaaggattaatctgattgaacaccttaaatcttataagaaatttgaaatttatactaaaattttcaagtattttgcctccgtaaaactttttttttcttatgaagaagctagaacctatgaataaacacgaaaacacaacaaaaatgactccaagtatattattcatcttgataacatgttaaatacaaatcttagctctcgagatcatggaacaataattaagaaaaaaaactatttgtggtaaatacaaatcttaactctcaagatcaacacaccttgggtgactcctgccatgttagagagcaacggtcaacttgcttagcaattaaccaaatcaacacacttaaaactattaagagtcctccaaatttgaacattttaatttagtacaatctttggtaaacatgtattgaactgttgatcttcctatatcattctttttaatttattttatttttatgaaaatattgttttagtctaatagagtgttctttaaattttgaaacgatagatataagagaaatttactacctttttttatataccaaaattttggattttcttggatcagtcattatttggtcaaacagagtcattatctgccacatttcttttattcttggtcatcctatagtttcgtttatggcaaatcctggggaagtttggttcaacaatcatattattttacgccatcccattggtgccggtggagaacttatgtagctcgatattttccaacatactcgagttgccctagagtgtattcacccggcgatttcattattactctgctaataattttttattttttttcttccaaagttaagtctaattgaattagtttgtaccctttttataatagcgaaggtctactcatattccatctgagaagagttgtaactacttttcaaattccctaaaaatcggatcacaaagaagtttcataattacttcaattattatcttatagattttatttctacttaaaaacacatgtctagaaattaaaacttaatttgattggtcgtttagtattatataaacaaggggggtcacttgaccacagctaaatatcaaaaattgtgttgcatgaaattccatctaagtatccacatcacaattgatagtttccaaggttttgatattccccaaccctgaattcgaatccccaatccccaccacacttttactccatttttctctatttatcctttaaatacatgttttcgggatattactgatcttccacctggaaagaaggcaattggtagtcactggatatttacaatcaggtataagtcgaatggggaaattgagcaggaatgctctcaagagtctctttgcttctcaaaagccgaatcctaatgagaagttgaatggttaaatactttcctttgaacaagtagtgtgtctttctagcttcttaattatatgaaattcctactcaaaatttccaacgatagaatatgttctgcccactctaattttactctatcctccaaaaaaacggctggatatctccttgacacttgtgatcatgattgggaagagttctagttggcataaacaggatcagaaaaaggaaagcttaaattaagcagacaatatggttaaatgagagtaaaaagttgcaacatgtattgtaactatcaaatatctttttttctttctttcacatgaatgctctagtgaggcataatttgccgtgaagcttgcatgtggagatcaggtgaccgcaatacaatttaatgattgttgatagcagagtaatcaatatcagctggaatcaactcttgaaattgcacgaaagaaacaaaacaagaaaactacagtttccttgatgctaataattactaagaacagagggctgccaacaagaagaaataataagagaaaaaacttaatcacagaaacaatataaagctcattccacaacatgtgcaataatataattgatagtttaccacattgacattgcgcaaactgtttaccacagtgacattacacaaaacacttaaaattataatagtaaaatcttacccactctcaccaatctccaaaaaaaaaaaactcttttacaccactagcaaatacttgaaagttcattaaaaccccacaaatctccaatacaaaccctaaatctttttgttttttgtaataaagacaaaccctaaatcttagatgaagagaaaagttcggatgtcgacaggtggcaactcaacggagcaaacagggcatcgaggagtgtgcaacaagtaacgagagatacaagttccgtaaaaaatatgattgcattttgttttatgaacaatctcgtcttctttcggataccctttttgacagagacaacaagattccgaactttggtaacaatctacgatctccgtcgttggtggagcaattggtacaggtctgtacgatcttgaccaaaccctctaatttgaaagtgaaagacgaggacaggacacgcgggaggtacgatatcaagatccttgaatgaaaaattggagacaatatagtcgaagatctgattacttatgttggactcgcgttgcatcatgaaagaccaaccgaccaaatctacgaatgctttggacaatccagcttttgaacctcttcctcgtccttgtcctgtgtatcgcgtcaatcgaaaccgttcacatgtgtgccaaccattagtacctccataacttactaatacaacaccgacatcagactcacaaggcacatcaaacttgtaaagcctgagattaccgagaagagatttcataattactctccttattgttttttttttttcttttgttcaaactatacaagtctaattgactctttttgtgcccttttataataatagccatgcctaagtttaattactttcctaaagaataataattatatataatagtataataaatcattgtagctattattataaataaagtatatacaagtaataaatttattatttgtttatcttttaattcaattagattaatcacaaaaagtaaaactaaaaagtgttgatatagaatgaattgcttgtctcttggattgatgattctatcaactaaattatgaccagcatatataatataccaatctaagtgacaaaaattaattcttatgtattacatttgtcacagatttttttatactattattttacatttgtcaacaaaataaaaagtgttgagattttttttttcacagtttttttttgtgtttaagattatttaagtgtcttacaattaataaaattattgaccactgacacggtttaaataaatatgacaaggcatgtgtcaaaagtttgttttcccataaattacttgcggagaaggaaatacactttgaaacggaaaaatagaaaagtaaaggcaaaaaaaaagaaaaggaaataacaaaaaagaaataaatatttggggtatttgcctaaattcattcataagttaaacctaatttctcctcttatttaaaccaaacgcctctcttaagaaatctcccaatatcttcctttgtcaatctcttgagagtttttgcttcctcgtcttcttcgattcatcaaacaggtatttttatttctccagatccgtagtcgtatttacgaattttgctttattctttgagatttgctcttgttgtgatttgtttgatttgattatatgatttgagctaacgattgaaatttcgtaacgatgaattttcgcaagtctgtgttgcgtttaggattcgtgaatcttatagattgattaggttttcacatataatcggaaatttgtacctgtttatgtgtatttgtaacgttaatggtgattgaatcagtttttttgtggtatatcgatatcgttgctgattcctgggttcattgtttgtttctgcagcgtgtgttttttgtttagagttggaagagacgaatcgaattttgaagctttcttttatgtctgacaagatatctccgttttgttgtcaatctggttgcttggaaaacacagtcctacatccagaattaaggactactactagttcctccatcactttagggtctcgcatcttcaaaccggagatccctcctctttctctccacttttttagctaagaagaatggcgctgcagaacattggtgcttccaaccgtaacgatgccttctacaggtacaagatgcctaagatggttaccaaaaccgaaggcaaaggtaatggcattaagaccaacattatcaacaatgttgagattgccaaagccttggctagaccgccttcttatacgaccaagtactttggttgtgagcttggagcgcagtctaagtttgatgagaagactgggacgtcgcttgtgaatggagctcacaacacgtctaagcttgctgggcttttggagaattttattaagaagtttgttcagtgttatggatgtggtaacccggagactgagattattattacgaagacgcagatggtgaatctcaagtgtgctgcttgtgggtttatctctgaggtcgacatgagggataagttgactaatttcattctcaagaacccacctgagcagaagaaggtgtcaaaggataagaaagcaatgaggaaagctgagaaggagaggcttaaagaaggcgagctagctgatgaggagcagagaaagctgaaagctaagaagaaagcattgtctaacggcaaggattctaagacgtctaagaaccattcttctgatgaggatataagcccgaagcatgatgagaatgctctagaggtggatgaggatgaagatgatgatgatggtgtcgagtggcaaactgatacttcccgagaagctgctgagaaaagaatgatggaacagttgagtgctaaaactgccgaaatggtgatgctctctgcaatggaagtagaagagaaaaaggcgcccaaaagcaaatctaacgggaacgttgtgaaaactgagaatcctcctccgcaagagaagaatctcgtgcaggatatgaaagagtatctgaagaaagggtcaccaataagcgcgctcaaaagtttcatctcgtctctctctgaacctcctcaagacatcatggacgcactcttcaatgctctctttgatggtgtgggaaagggattcgccaaagaagtgactaagaagaagaattacttagcggctgctgcaacaatgcaagaggatggatcacagatgcatctgctcaattcgattgggacattctgtggaaagaatggaaacgaagaagctttgaaagaggtggctctggttcttaaagcattgtacgaccaagacatcattgaggaagaggtagtgttggattggtacgaaaagggtctcaccggagctgacaaaagctcgccggtttggaagaatgttaagccttttgtggagtggcttcagagcgctgagtctgagtccgaagaggaggattgagtcacttttttcttccctcctaacttttctttgcggcatttcttataatacttcgtcagttttcagaattcttaaatctttttgctgtgttcttataaagaaacatcatctattaaagttgtcttcgtttggatttggttttgacgactttgggaaatatttatgtttaagaaggtttcattggtcattgacttttatatattatatcgtaaccatgatgtgatagtgggccttagatcaacaaacatgcgaaaaacagaagcagaggcccgtttcaacggagcataataaattgcattctctgtcttttgtttttaggttttttttttaactgatagatgtgccgtcgaaaataatattgatatttaaaaattcacaacaaacattcttaactgacccacccatctatctgctattcccacgcgccaaggaaaataataataatagcgaaattgatttttacatttatttattgatagataatttgtgtattgttaagattaacagattttaagggattaaagtggaaaaggtaaaccgaagacaacttgccatttactgatttacaacaatccaaatttaaaaacaaatggtcccagtttttagggttgtcacttaaatttatcgaaatatttacactttaattgggtaaaacataatggacagaaaaacaaatattgtgacaaacaaaaaaacatgttttcaccaagaaaaacaaaaacaaaaaagatgtaaagcttttcttacatctgtacaaaataaaagcagacgaaattgtactttattttccttattaaattgtcggtatgttttatatgttgtgaaaagtagaatggataaccaaataaaaattactgacatcttaataaagttggttcaaccggtttaaaatgtatttttttagtgttaacaacttaaagcttttttcgattatcgaattgcaacaaacaaatatattaacagaaaaaaggaatcatgtatctatttcaatatcctgttttttttcttccatttggatatttagatctttttctgaatttatcttgttcttaaattaaaacagaaaaaaagattaaaagtaagacagcttgctaatggcaaccgcaacaaacaagataattttgaaacggatccacttggattttctttgattttgtagaaaaattgacaaattgcttttgtataaaaacaaaaaatgtaccgtaaaaacacacacataaaaaataaaaagtgataatgacaaacaaataaagtggtatttttcttttatctactaatgtgattataaaaaaatcgacattgaaaatttcaacacatctttttcgccaaaacctgaaaatggtcttattataacataaattagtttttttgtctttctattatatattcaataactcatcccaacttgaacaaacctatttcaaatttttttgtcttgaataatgataagttccgtagtgttcttttctgttgtgacaaaaaatactagctaacgagggataagcacaaaaacatgattaatgtttctctaatcattctaaaaatctacaggaatattcccttttcagttttttctttcttaaatgcatttcttagttcttcataattcagtgagttttaataacaataataaaaaaaagagcatcattaattgaacctaaaaataatgagaagaaaaaccaaaaagatagagagtaagatgcacgcgctaaagatcgaacggttaatagaatcaggttagtgaagagagatattaaaagtttgttgtcgtgtggcaaaaactataatttccttctcacaaacaaaaaaaataaaatcaaacacaaaatcccgtagcatcgtaacagtaattcgctattatctcctcaccctccgctttcgcttcccttctctgcccgtttcaattccttctaagacatcacggtctctctctataaaaacagtacctacctcttcttcttcttcttcattcgctgacttcgtttacactgaaaacaaatacctatgtcaccgccgtcggcaaccgccggtgacatcaaccaccgtgaagtagacccgacgatctggcgcgcttgtgctggagcctccgtccagatccctgtccttcactctagggtttactactttccacaaggtcacgttgagcactgttgccctctcctctctactcttccttcctccacctcgccggttccatgtatcatcacttcaattcagttgctcgccgatccggtcaccgacgaggtctttgctcaccttattcttcaaccgatgacgcagcagcagtttactccgactaattattcacgattcggcagattcgatggcgatgttgatgataacaacaaggtgactaccttcgccaaaattctcacgccttctgatgctaacaatggaggtggcttctccgttcctcgtttctgtgctgattccgtcttccctctgcttaattttcaaatcgatccaccggttcagaagctctacgtcactgatatccatggagctgtttgggatttcaggcatatctatcgcggtacaccgaggcgtcacttgctaacaacgggatggagtaagttcgtcaatagcaagaagctcatcgctggagattcggtggtgtttatgagaaaatctgcagatgagatgttcatcggcgttaggagaactccgatctcaagcagcgacggaggaagtagctattacggaggagatgagtataacggttactacagtcagagtagcgttgccaaggaagatgatgggagtccgaagaagacgtttaggagatctgggaatggtaagttgactgctgaggctgtgacggatgcgatcaatagagcgtctcagggattaccatttgaggtggtgttttatccggctgctggatggtctgagtttgttgtgagagctgaagatgttgagtcttcaatgtctatgtattggactcctgggactcgagtcaagatggctatggagactgaagattcttctcggatcacatggtttcaaggcatcgtttcctctacttatcaggagaccggtccatggcgtggatctccatggaagcagcttcaggtatatgatgtttttgaaatggtctttgctcttcttatctctataatgttgcgttaatggaacaattcagaatcgatcttgtatctgttgtgtgcaagcctttcatgagtagtttaagtctcatcctggttattcaaatgtcaattgggttttgaatgttgttttgattgctgtgttgttgttttgaaggtaaatattggaaacaggataagttaattcatacgaaaatgaatgttctctctcagattcatcttctataagatggaattgaaactggaagatttggcttagtattgtttgtgttgagcgtccgtgatgtagagttgcttttcattatccttctttggccacgcattgtacattgtgtttgttaaactagagttcctctgattagtcttatgagatactccttttttgccaatatattctacttcctctgattagttcctttgtttttaacttgcgtagatcacatgggatgaacctgagattctgcaaaacgtgaagagggtgaatccatggcaagtggaaattgctgcacatgcaactcaactgcatacccctttccctccagcaaagaggttgaagtatccacaacccggaggagggttcttgagtggagatgatggagaaatcctttatcctcaaagtggactgtctagtgcagcagcacctgatccaagtccttctatgttctcgtattctacatttcctgctggcatgcagggagccaggcaatatgattttgggtctttcaatccaaccggattcattggaggaaatcctccccagctattcaccaataacttcttaagtccgcttcctgatttgggaaaagtgtcgactgagatgatgaactttggcagtccgccatcagataacttatcgcctaatagcaacaccactaatctgtcctctggaaatgacctggttggaaaccgaggccccctttcaaagaaagttaactcgattcagttgtttggcaagatcattaccgtggaggagcattctgagagcggtcctgcagagtctggcttgtgtgaagaggatggcagcaaagagtccagcgacaatgagacacagttgtccttatcacatgctcctccaagcgtgcctaaacattccaacagcaacgcaggttctagctcccaaggtatattccgatctctctcaagtacaataatcaattgaatcagttgctataagcttttattactgttttgcacaaggcaatttctcttcctttcccatgaactatattatgtagagtaggaaacacaatcatgatttctgatatgacttgactgatgatgatacttgtgaaaactatctatatatctcttcagtaatcagtcgccttgaggtaattggaatttggaacttgaacattacttggattttaacttttcaatagcataagctttcctgtttcatcatatatgtttcactatacttggtatgcttttattactgctgatatttactattcctgctattttttttgggtctcgttaacggtaataaggacacagaattggctcttttatccatctgaactagacattactgtacaagtagatgaagaattatgtggttccattacaaatttgatttgcagaaagcttgaagctgctgcttatagacgattataatgttggaagatcctgaagcttggaatgatttgtacttttcttctgtttgtgtgtgttttgacaggttaaaaagtgaaagaagtggtggatctttgctggaatctccaagtcctaagtagtagtagtagtactattatatataattctgttgtttctgcaattgacttttctctggcttttctttgccacgtgacgattccgttttttactttctttcttttttttttatcaatttctcagacacatttgatgaacatctcgctctcatctaatcgttaactatttttattggggtaaatgtctggatttgtcttacctaaacatgttttaagactgatgtttatgcagagtgaaaacagcaaataatttaatgctttattcaatccctatgcaatggatctaacttaacggcgccaaccagagagttttactaactgttttttgcttttagttaatattcctaataaataaaaagactgccaataataaaatcggaccatttttattctcctaataaataaaagaagctcaagggaggtccctcctacacttttctgactcctttatgttctgttctctgtgattcattaacggatcagctatagcatttccaatttgtcagtaagttagggttggtttgattagctaatagctaccaatgagacaaaatatattaggttggtttgattagcaattaagacgacgacttgaattatgcataaaaagacatttgagatttgaagatctcattaaacaattggaggagacttggctccatgtctctcactgttttgcacggtaataggagtactacattatataaatttggtaaaactagatcaacatcagattgtttcaatgtttatgtgtacttgggaagagtggccctgcaggtcttaatttaagtttcctcaagtggtaatagtatgaaaaaatataaacgtatatgttcttggacaattagctgtaagttacagcctgtaacgcaaacttgagagtgtaaataaggacaacaacaacaaaagtaaataagaaaatttcagaaatatggttatgtgttgaggagacacaaatcattcctggttctgacttcaatcatactctctgcataaaagaagtagtagtagtagtacataaggacaaaaaactattaaatgtaattatttgatctacaaaatgttatttcaacttgagcaaaaaaatgtaaaatgttaatttcaaaataaaaataaaaagaagcaagtgggtgaagtttctgcatggtaaaaagtgtgaaagaagaacatgagaagaggagtggtgtcctctgcggaagaggcaaagcctgactcaagttttctagtaaaaaacactttccacatagcatttttttttttttttttttattattatcatacttttggtttcctgttaattgatatttgatgatgctgtcctctctctatctcccgactcccatatccttataatttgatgtggattggacaaaacaaatgaatgaaaacgcatcaaacagagcaaataatactaaataaacaagataaatattggagagaaagaaaaaaacaagaaaattgctaataatattttgagaaataaaatcaaacaaaaaaaaaaactcatcataaaaaaagtagagcacgagatgctttctcactctctctgtggatcactctgtcttgcatctaagtcaaatcaagtccaatcctcaggtttttaatcatttgcttctttttttttgtcttgaccaaattcattttattacctcccctgcaactcttttccgtatagaaaagacaactgtcacaagctactctctttcgcagtcaatttttattcaaaaagcaacccacaacggccaaaaaagtgtaatagaagattcaaatggaatacttttacttagaaacctttttaactttcacattttaacttctacaaacagtactagtccatatttactctctgttctgaatttaaacaacaacaacaacaatagtaataaaacatatattttgattagatatattttaaaacttcaaataaaaccagaggagattcccattaattaacaatctgattcatctctaattaaaacctaataacactcatttttaattcatcacctgtggctacaataatccaaaagcattttcctaccatcaacaatatcatcaaagaaatcatcaatctgagcaacaatactctctgttccattcctcaaactcccaacacttcctttcaaattctcaattctctctctcaaccccttctccaccgcctcctcctctcctccgccgccgcaacaccgccgttccagctccaccttaagctcctccatcgccgtcttgcttctcctatactcgtacatcatcattcctttcctcacccctatcctctccatttccgccgccactctctgctttaacctcatcatcgtccccgtcggaaccgtcgtgtctccgggaatgtaataaacaagaccttgcatcaagatcacgagaagtaacgagtttatgttcttcatagtgttcatcactcctctgaaaccgctgaaaccgttctgtatcttggaagactccatccccgtcgtagtaacttgctccgaccaaaaaggaaacctttgaatacgattctccattaatgctctgttttcttcttctatccccaccgcttctctcctacatccagatatcgctcgtatcacctgtcccatatcaaaaatattccaacttttcaagaacataacaaaaaaaaaaaaacatttcattaattcaactttgattttttattaacaaaccaaaataatgttgaatatatattattattttttgttactaggacttacaaataatttgtgacagtccaaaaaaataacattgtttttcgtgtatatacctgccgggaaatctgaggggagaggagacgacggtggtggtagtggccgtcgagggtggaggtgatggagatagcggaggagcaaaagctttcgatggtggagatagcggatttgatgacgtggcagacgtcccaaagcttggaagtttcgtccatgtagtcgtcaagccacttgtcaccgacagggaggttaagtttctggacaagaagtgtgagatgagagtgagaggttcttagaagacagatgactctctgtaggaactgtaaggacatgaagttgttggagatataaaccctttcgagatcttccattgatctgtttagaaacgagtagaatccgtttactgagtttgaacaagactgatccattattgacccttaaaaaatatttggtgtttgttggtttgtttggttgattattggtgagattatagggagagagatttgggaaggagagaattaaaaggttatatagagatttggatgtgtatgtatagatgaaaaggagagtgagagagaaagagaataataagaagaagagaagaagcagagattatgtaaggatgaaagtgattgtttggagcaatgatggttgtttcctatagaggaggaaaatgatcattggtatatgctaataccaatatctcaatttttcatatctttttaacttaattttattatggaaagaaattgttattcagaaaaaaagagttgagaattggaaaagtactggtttttcatggaatccatataaatttgtcatctattttctggtacatcggagacataaatgaaattagaatattaactctttttttgtctagaagttactcatatcatatctttctttttttctgcttgggatttattagatagattctttgtccgaataaaatctctagtagttgatgattagtagagcgaataatgatcatgctttcaatacataaataatcgaatattactagtaatttagtatacgactttagcatttttagattttgtacaaaggcatctaataccatttcatgatttaggagttataactcgctgcagaaaacaaagaaattgaataacaattatcatttagttcagaacttctgaaccttgtgtgtgtgtgttttagtatagctttgtgtaaaaatagtttgaagcacaaacaaaagttgaatgtataaatttgtacataggtataagttacaaatattctgtaaccataattacctaatttagtctaacaaatgaaaccatcaagcaaacttgattgtgtgatgatttgtattaatagttcatatactaatggctcaatgaatcgagatagataagataatgttgtataaacatttagattcgttcatattataatactgtaactaaagtatacaaggaatgaaaaatcaatcaagttcatacctccaaagtggtatttcggacccattcgacggcggataccaagaaaagaagtagtactattttaaaaaaactttttttttttggtcaaagacattatatatataacatataaatgacgcagtggaatatttaacaaaactaaaattagttaatgcaaaaggaaaataagttgctttattcccgttatcaagccggcgcgtattctatactcaactcatttataaattttttaaatttcgaaacctttttttttttccattaaccaccaataattatcactaatatacaaatttggttcttcggttaggatgatcaagaataaatacgtcatatcgggaaaaacaaccacggggccaaatccttaaatagttttggacaaaatcaaaaacaattttaaatatataatatatatatatatatatatatataatgttcccttagtagacaaggaaaaaactgtttctattcgaatcaataaaacaagaatccaaaattatttggtcaacaattagtgactccatattaattacgcatgtgtttctttgtggatgtgtgtgtatatttagtgtgtgaaaaattgagtggtgaagtgtgtgggagagagggggccatcaaatctaatggaagcgtcgggcgactcaataatttttgtttcgccattaattacctttgtttattttgttcttagacatctttttgggtcacaattttattagtattatttctttgtcaacaaatcaaacagacaaaagtattatgaattgatagcagagaactaaaaacccaataaatcagaataatattcttaaaaaactcggcaagtctagaatattgtattattggtaggaatatttatattaaaaatgtaaatcacaaaaaatctacatgttttggtcaaatgtaaagtaataatatgtatattaattacaatgtacgtataaaatagctatcaatccagcaaaagagaagagtgctagtagatttgtgagaatgtttcgttttctcagtaatggcttgagataaggaaacaactgtttttggtccataccctctcttctctttccgtctgccgttttgaaattgatcttcctattttcatattacattattagtctcttcacttcattttcccattgaattccagttgaaatttgagaatgtttatatatatatatatatatatatatatcttttagtctttcatatatatatatttatagtagtaagtgttcaagactttgaactctaagataagtcattttgaaaagagaataatatgtacgactgtagttttctttatagagtcgtctacgactttgttaaaactcgattgggaaaacaagattataacagcggttaaaagttttgtaacttttattgtagtatacccgatttacctaaaccaaaagctatgtgatcaacactagtaatcaagtttataaggtcaaaagaacctttaaagggtgaaaagaaaagttgataagttaataactgataagcactccactaatcatctaatcggacggtggagatacatggaagagttgattatttagagggtcaagaaccgctacttaagatacgtttgattgatttcaatatttttttaaaatagaaaagtaaaagtgttgagccgaaattaggatgcaaaggtatatgccatatcaacgttaaatggtagagatttgtggttgtaatattccacttatcattgatgcacatgaaaattgtaatttgttttttaattacttgttgatgtggtccaaattctcgatcttaatcatatagtatgaactaaaagaaagaacgattggagaaagttgtactgtttatacattgaacacaacaagtgtttttatatacatattggacatacataacttaaaattttttgtttcaacaatgcaagaattttgatcaactgactttgtatgtaaatgctaaaaaaatctgaagaagatggagttccaaacttgtgttggtttgtgggtaatttccaaaatactacaacactttatataaagctgccaaaccaaattttccccaaccaccatccgctctaattctggcttcacatccctattaaccggataaagttataaagtcaactgattacaaaacagagtaggtcttcgcttttatacaccagagagagaccacttaactgaatttaaaacgagttctggaaaaaatctagactaattcttagtaattgtaattgttatgcgaaattacatattaaagatggctaactgaagaaaaaactgacataaattgagtgacttaaatatgttgtagcaacataaaaggaatattagtatagaacaaacaacaaaaacatttgagtaaaatgcatatttagtgacattaagagtaatgaaaccagtagagatgtcgtaggcagttgagtagcttaatgaggtttaggtccacagtatgggcttcttctgatatattttaatatagtttatgagcacatttctcaattctatttattcaaaattcccttagaaaatagtagtaattaattttagtgaccctatctatatatatctctgtgtcaaggccggcccttttcttctcattctactacacccacaagccacacctatttatcatcatcactcctcctaaagcaaataaatgaaagaacaaaaaatgaagaagctcaatattatacttacttgttggtgtgtcatgtgtgcgtagatatgatgtggattgtgtaagaaactaatgtggctactgggtcctctcatatgggaccaaacttcgtagactttagtatttacattcatagaaccaaaacattagtctcattacaaaacatttaccacttatccgttaaggctataggctacaaacaaaagttaccagaattgaccaaagaatcttacgagatttgtgattttggtatatgcaattattcaagtgtgggagtgagtatattagatctatgaaggagttgaagccttggtcatctttaagagcatacgagtgtgcagaggtcttctgtcctggcttgtgagatattggtgaaaggaaatatcctgaactttccatttgccatgcacgttagtgttagctgagcatcactcaccattgcctgtcgtattcacatatagttttttacaatgttgtaatcactaatcagactcagaatttgcatatatatagactcagattctagtttcagggtcacaacaaaggttatggtttagatgaatatacctcgcaggaagtagtcatgtcgctgcagctccattttttggttggaacacagtcaacatagcgacaccaatggcaatgacggttgagattgactccccagcatgctgctaatagaaccccggcaagtctaaacagagatggaaagctttttcatgtcacaagagcgtagataaaacaaaaaaaactagaccaaaaagagatttgaggtaaattctcacattccacaaaacacgagcaggcatataatccttaataccggtctgtcaaactgttctttaagccttgtggatctgttcatatcatcttcaaacaatttccccttatgagatggaggcatctgtctcagttgtggtttgaacaatagcacaaatccaaggaggaatcctgatatgaaaccaccaatatttgcaaagttgtctatgaaagggagaaagcctatcaggaaattcacagtgaagatagtgaatattatcgccaaggctgaaatctgtaccaagcaaaagaaaatacaatcagaaaagctatgagaagaagataacaagagacaaaacagaaccacaagaaatccttgaccttgctgttatatagattccagttctttgcaagtgcagaaagcatggctccaatcaacccaaagaaagcagcaccagaagagattgatgggatgttccgaacaaacaacacagcaaacagactacccataatgccagagaggaagtatatgactgcaatcctcactacaaaaccaaagcaaaagcagaagaaaggtggattagaaaggtgatagattccatccaaaacagactaatcaaaagtcaagtagtctaaattacatggtccaaactgttgctccatgtatatccctacgaaaatcaaactcccaagatttatgaatagatgaaataatccactgtgcagccatggagatgtcaaaatacgccaaatctcatgattctccgtcagagctttccaagaaagacctcccatatgctctaacctgcaaactcacaagaaaataagtagtccatagcttataatcagtcatttgatagctcaagttacccctatttcccttaattttctgaaacatagagctctcacaagaaccaccacttgaattagattgcttcatcaacagaatgtagcaccaagagccacacaaataaacacacacacacactagaacaacacagaattgtaaacaagaacttgtcggttgtcactgtaatcagagattgagacactatgaatcagctgaaactcatcaatcttggaaactagtatcatccaaatccaacaaacttcagcaacctatcgttaccgatccaaaagatgagcagaatgaaacatccaaaattacaggtctaagcaacgaagcatccaaaatccatctctaaaggatctaacaattcaattagagatcgattccaaaatcagttacaagcagagaccaaaagcgaaatccgccggagagagctacttacgttgaggcggagggaccaagcataggattctcggagagagactggaaagagaatcggccaaggagtttagcggagcagtgaccgtgagagttcccggagcaatcgttgacgcccatagttacagcgaagaggacgatctgaagaagaacgaagacggagacaagccaagtgtctcgtttgatttgccgtgaacggtgacggaagaatgagatcttgtcccagctagaatcgccggcgttagaagtggtaaacgagagattgtgagagatttcatcgatctgcgtcgtctttgactctgtaggaacctccattgttgaaggtgagcgagaaattaggggatgatgacgaatgggttgttttatactttgtagaaattggcgggaaaatgttattggagagcaaaccgaacgctaaccgtttcacgatccggttcggaattgatttagagcgcgtgtaccgcttactatacacgtcattatcatttgtattaaactcaaatcaaaattttaaaagatatagctggattaattttttcaacgcatttgattctgtattttatttttattaaaaaaagattcagtgaacatataaaaagattagtatcattaagccattattaattactattttcaagcaaagaatgtatcgtgtttgtggaatgtacgcaaggaatgattcatgtattcgtgacggttggttttggttggcgtctaatatgacaagtgatcataaaagcttatgttaatatatcatcatataatccaaatcatttatagttagtacttagtatgctaaatatacgttgcaaatttatcgtatatagtcaaccaaaaaggtaaattcagatttgtataaatgtaaatggagagatgactgtatcttgagatttctggtagttattatataagttgagaaagagagtaagagacccaattattgttattttctaaatttggctctgctcaaagacaacggaactctctgcttttcttctttctagagatcttttcttgaggtaataatttaaagatgggagatgaagatttaatagaattgaagttcagactcgcagatggtaccgacattggtccaagcaaatatagtcaattcatgactgttgcatctctcaaggagaaaatcattgctcaatggcctaaaggtaaatcattttctatgtttcttctcaaaagttttgctatttgtttaaaggtgaagttgaaaatcttgttgtggacagacaaagaaaacgcaccaaagatgataaatgaggttaagctcatcaatggtgggaagatacttgagaacaacaaaacactttctgaagcaaggtccttaataactattggtgaacttcctggaattgtaactacaatgcatgttgttcttcgtcctcctctctttgagaagaaaaaaggtaatttctatacattttctcttcaattcttgagtgtttttgtgtgtattttgtatatctcaaagctttgtttttatgttttcttttgtttcttcagagaaactgcagaatgatcctccaaggaagagtcactgtgtatgctgcattttgtagctccacttagagatttttgatcctttatacaatttattccattggaaaaaactttccatatcttaaagtcttcaacatggatcttcattaccagaatgattttggtttttcttccttccttttcttcttcattgtttatcaaaaatggcttaagaaaaattactgtgttgttgaagattgaggtattatgtaaaaatttgttcatatgagtgaaaagcaaatatgagttgcttgaaaggacctgttataacacaagaagataactagttatatataactttagagcactacaatatttacttagagatgtatatccatccacatagtaacaaatgctccaacttttatctgttgtgatcactacatcttcacacaagcttgagcatttcctcaattagattgtttatggctctatacttcatcatcacaatgtttgcttcaagaaagagctgcaagagtttcagaaactgagtgatgataaaataattactgtgtttttctttaagcatatttatctggaagcttggtctgactatacagatctactaaatcagcacatgcattgtggaaggttgtagggtaagttttgattagaaagggacaccattttatggccttaagatggagagtaggtccactatcagttaatgggtgaggaaaatgatggtatgacatgacaatatgatataacatgagttgctttcaatcaacctatatagtacactaagattattatggatgactatatagtacactaagtttattatggatgactagttctgaaaatgaccccttttttgcttttgtccttcaagtgcctaattctctgttttttccagcctagttaaactagtaaccacaagtcagtaaatcaacatgatgtaatcaagaattggctatggcaagttctcgaaacgattgtatgcattatgcaatcatattcaaaccataaatcctacatcatatagaaaacaaaatgatatatatgatcatgaggaagcaatgactcaaacagtggtaacaagatagtgctcgagacaaattgaataggggcaacgtatgcacaacatgacaccactcaactttcccataaacctcatggtcgttgcgcctctcagtcataaagaaatagagacaactctcggaggtacctaaaagccgtcgggtctcgtagagctctgtggaagcgagaagagagcggaatctcttggagactaacgagagagttgggtagtacaatctagagatgcgtgctaagcaattcaagagtagatcgtctgggagatatggtatactaaccttttcagcttcagatgtgctactcaacacaatcttcttcttcttcttcctcatcttcaccgacgacttgatcctctggcagtcaccgaccaacacagttcttcttctccgacaaatgcttttttctatttcgctaatctcaacaatttgggtcagtaaaatgctattgggctgggcctgtattcttttcttttatttaatttaaatcgtaagcctttttacgaaaaaaaaaacaattggagaagaacgagatttcggggattctgatggttctcaatgggccttttaactgattcaagcccactctcttttttttttttggtgatttcaagcccactctcttaattcacttccaaagagttttattaaatttaatatgttactaaaattttttatatcatttaaaaattaatagttaattcatttgtaaaggtaaaattgaaatttgttttttgttatgaaattatgagtacaaaaataactgtattttatttcttagctattaaatcgcacactttaattactatatatatttttctttcaaccaaaaagtaattggatattaaacatcataaaaaataaactatttttttccggattttttagttttttttttctctttttaaatatatagagaatattaaatagattgtgaaatatgttatatggtacgaacgatgggataaggattctcttcttttgatcctaaagtttggttttcttttcttttttctcgtagttgcctctgcatcacgacgccttacgtgtttaaacacccacattatataactttaaagaaatggtctacaattatataatcactctctttgtatactaatctagtatagttaacgaatacttgcattaaaactggctgtagctcattcgaaagtggattttggaacctaataaatgatgacataactaaaacgaattagatgactatatatattaactctataaacactgaggattagtactattcaactcaagatcttatataaataaagtagattagcactatgattagaagtgaccccatgttagatatttttgtacttttaattcaatcataaacatgtactatgcttgttagaatttaaatgttgatgcaataacgacaataatacaaagtagtattaaactacctttttgtctatcaatgttatgatttgcgaaaatattataaatgcaagttgtttagtgtgttgttgcctgattcacttggacgattatttttgacttaaaaatgattctctactaatagaataaaacgttgtaattgttatatatagatcttggcgcagccaggcagcctcctcgagtcctcgtgttattctacacttaacttttataggccaatattattccctcaccctttaattttatgtttatatatacattgaaggaagctggagagtaccttctatactaatataaactaagttgtaatttgcatagtttaaagcgttaataacatacatttttcaaccgtccattgatcttcaatcgattttcaaagatgccaaattaattcaaaagcgttaataatatttgtgttacaaattaaaaatgttgtttcttatattgatgtttccttttactgtactacgttttttcctacatctacagaaatatttgctttatgttgttcttatcgataacaacttacttcgttccacatgatttttcacaaaaatctcatcgtattttcgatgtggaatttgtaacaccaacaaaagtatgtggaagtgttttgtgttttattttcagcgtcaaaatgattatgaattgtcattgacacacgtggtgaatacaaaccgaaatgtcgaatactgttgtatgttgctcttttgccgaaagacaaaaatggagttagtatcggatctttgacattttcaaaaaaaaaatgaataacgaatatatcgaacaatatctaatataaccgctcaaataattagattatgcaagaacaaaattgtctgcattatccagaaatggaaccacataataagaaacgtgactaaaaacacaaacaaatctcagacaaaaaaaaaaaaaaagagagtgagaaatgctatttatattagatgagtgtgaagtccactaccagcaatcggaaatatgatagatataaaatagaataaagatttggcatatattttaggtatacacttaaattaaaactatatgttcttggcttcttaatttggacacgtttatggatattgtggtcgattcgattatcatttggaagctaaattggcggccgagtcagattcctctcaggccttctccaatacattcttggattatcactcgaatcttgatcactttttgtttattaattgttttgaaactttctaatagccatcatactttactacgatcaaataatttttagttaattaccgttatgaatccatatcgtttgttaaattataaaaattattttgtactttattttatattactgaaccaaaatctaaaatcaagtgtgtatgcgctttcaaaatctctaagacaaagtgtagttgtttttaaagaaactatttttacgtcgattgctgattgttgtgccccttttcacaattttgattatcccttcgagattagtttgcatctttttagtagataattttggattgatctgtagacaaaaggaaatattgatcggtcatcggtccattaagaaaataaaagtttttagagaagtcataacagctacagcatgcgagcataagatacagtaaaaaaagactaaagtataatcaaaatttcatcattaacttttctgtcgtttagtatgtgaatattttgttttcactttttaataatttgatggatactgagaatttcagtttcaaattagtaaacgataaagtagatgataattaaattcatgtcatagccatgaacgaatgttatgttaaaaaaatttcatgtaagtaaattctttggagttcgattcttcttttgtccttacacaatcaaagatttttctttcaactttttttacttaacagcattaactctttctcagatcttcaattgttttcctaaacgaaattatcattaaattgtttaaaaaatacacatttaatataacatatatcataacaagatatattatatttatgaaaaagagatgtagtactacagcatatggtggcaaacaaacccactaaattcagtaaaatggaacccaccaaatttatctataaataagtccccaaacctctcccccaaaaatgcaacaacactcatctttcccaatataagtttttaccaaacaacaacttttgttttgcctttcctcaaaacataattttgtcttattttctaaaccggtaaaagatgtcgctagctatcgcagaagtttacacggtgaggaagtttcacagagagagtatgaagaaaccggccaaacagacggttaccggcgagggagatgaaaagattggcggaggaagtttcaaggaggcgccggtgaagtcaggtgggtgtagaagattcggacggtggttttttgggaagccgggaatgaagaaaagctctgctaaagtttcggatcccatggcgattgagtgatgaagaagaaattaaaacttttctcttctttgccttttttttttttctttctttattttgttttattttcattggtctttttttaatggctttttctagtgtcttctctttttctttattgggtgattttataaatagtcggtaaacattgtacaatatgaactacaaaaatatgagaaaatctatatatgtatgtagaatggatgtattccctaaataccacagctagtttgataagttttatgccaaaccaactaaacttgtatgccacgatatttcgtatttcagaaaatcgaaaattgttattttttagtgttttttaaaccatatatatatatatatatatatatacaaaaatacaaacatatgaaaataaacatatctagatttagtttttagttggttaaccatttggcacttttgacatagttttagtttaataatctatcactaactgtactaatcttcttcttctttttttaactgcaactcacataaaagaatatctagatttaaaccatgatattgcataaaccattaaattcggttgtagcaatatttatccaaatatgaattcggcgctatacaaatataaaaacaaactattttggcgctcttattatatgtcacgacaaatcacacacattaaatatatacaaagacacaaaaacaagataaaatatataggaaaatacttttaaaagaaaaagtagtggggttttaagaatataaagaaaattagtggatgttcaaaatattgagtagtgaaaaataaaccaaaacaaaaataatctatgagggtgattaggagaaggttctgctcgtgacggtttgttttttcagccaatcaaaaagcttttaagtggatctcactagatttcatagcatacgctaacgacctaacgttaaagtcaggcaaaatctatgtttaaaatttgcgtcgttcaaaaaccattccacaaaaaatacaagctaaactggcggcagagtctcagttcaatgaatccattacgagctttgtttgaagaaatatttaacccactgactcattaataaagcaaccaaaacaaaatcctttaactataaaataattaaacgaaagtaaagaacacacgaaaacaacaataaaagaagaaaaagcaaaagtaaacgacaacaaaattaccttaaatatatattctctcgtaacaagttggcatatctaatctagttatattgagatagtgtcatgcatcatgatattagatgttttatcttataacattgcttttatttttaccgatttaacaaaatcgtatattgtatgcaggtagtcaaaattgatacagacttgttttatatcagccaaacatatcaattcagtcaagtgagttaacaatgtatgtcaacaagggggaattgagcaatttaaagagttaaaagaccattaactaaacagacaaagagtttaggagcaaaaagtaataaagtaataataaaaggtcaaaaagtgtaagaaaaaaagaaaagaagaggaaggttctgtgcacgtaacttgaattcgtaaaagtccattgctccttcttccttaagctctttgctaaatcttcacgcaatgactctctccttcaaattcaatcctccttcttctcttctattctcttcccgcttcatcctcctcctacgtcatccggacgctacgtttccccggcgccggcggattctaccggtcagttctctccgatcaaactcttatgctcattgtctcctggaatttcaacaatcttttgattagaacttttagattggtgttctgatgggagaatattgttgaattgacagattcattgcgttagatttgtcactgagccctaagaatttggggaattttggtctgcttcggcgaaggatcgatggagaaatctaccaaatgtgctgtttgctacaagtcgtttcgtccctcaatctgtgtagattgtgttaatcgcgggtataatcaggttctcatacaatctgatatgatcttggaatctttcaaattcttacgagttcggatttgatggcactttgtgtgcaggttaaacgaatacaaggtcaagttggactcgttgaagagtcttcgggaggtttcgtatttcagattaagtggcttacttgtcacaaaggttcattgttgagttttaagtctgatctgagattcatttgcttttcttgtgttaaatgatgtcttattcttgcttgtgatcttcactattgaccaggagaaagcaattagtcaacgttgttggaaggagcttcagaatgagaagcttgctaagttgcgggagaagcttcagctacaagtggagaaattgcagcaaagtctgaacatacgcccttaagtaattcgtctttcgccttcgtaacaataagtctaaatagacctacttcatgatgatgcaggcaaaaacacatttcggagtctatctcgcaatctgaaagagagatatggcattattgaatcaactaacgttgctgtaatgtgatactttcttttttcatttgctgctttttctctcttaaaaagggatttgtatgatattaattttgctatggttaatgtaaatagtctcattttttgcagttagaggagagccgtgttcaccaactagagaaccactattcagatactattggcaatcactacttggtatatgtaagatctatatctcattatactttaactctatgactatgcttgaactagatcttttactaggactcatatactcatttctgtgtctcacttttttaaaaaatccaatctcatatgtacagatcgatctaacttcggaacgcctttataaacaggctttggttatgaaacagatatgcaaattattccctttatcccgggtaaggacatccaactttaggttcttatctcttcaattattaaaatacaggtttcatagttaatgtatagagtctatgccaaaaagaagttggtaaacacatcttctttcttccagaggccatcttggaatttctcttcagactgctgtgttattgtacacatcttctaggatggttttactgaatctaactatgttcaggtgacagtagaggggcagaacaaagatgggtctagtgtacaatatgatcaaatctgcaatgctctcttaccacaaggtctcaacccactctctgttccgccaaaagagctcgcagcctcattagggtaacatgtccccgtctttttacagtaattttgctgtacagaaataatttaagatatatgtagactgtagatcaatctcctaagtgcatcttctactcctgcagatcattttactcataatcatctattatatttgatgaattaacattcccatggttggtggttggatcaggtacatggtgcagcttctgaatcttgttgtccataagctctcagtgcctgcacttcataacttgggtttcgcggtagatgccaactcattttcactcaattttatgctgaaaacagttgcctcagtaactaagtctgagaaaatcgcacatacatacacaaactccctgcatgcaatctttgcataggaaataaaattgagagataatttgttaatattgacaacatattacttttcatctggaaattgattgattgactacaaaaaaaaatctgtattgttttgtctcagggttcttgttcaagaatatgggaacgagattcttattggaactcttatccatcttctccaaggtaaaccatatttgactgataagcacttataatagtataaaaaaatacacaggaaggataagatattagagatctttggccattttttagtggatatttgggagctttttgtcttaggtagggactcgactttgttcattgagtaataaagatacataggatcactgatcttaacattgacatgacaggaactgtttgtgtctccattagagttagagatttaaacgatctttttgttttgtttttctgccagcaatgggtatcccctttttgtaccaatccatgatcactactcatttgaagagaaaagttcatggacgggtagagatacaaccaattttggtgtcacttcgttgaaatcagatggaagtatagaagaagattatcatgaccttgaccttgacgttgttagcctttcttctgcctctcctcattccgttgaaacattcagaaatctgcagcaaggaattgcacatctcaagcaaagcgtggctcacttgactgtgtacggatacaggtccctgtctctggaagttccttccggaacctcgacttttgaaacatttgcaaagttgctggctacattatcttcactcaaggaggttcagtctggtctttcccttgggctgtcaaggtaaagcggcagattacattgtttcatatgactatacagcttgagactgacatatacagagaaaaaaaagttagattacctgtccactatagctttgtatccgaatttagacacttcatactttcacctctgacgtttacagttccaacaagcaaagacacgagccgaacaaatccgtgtggaatttgaactcctcaagttccagcaccttgcttaacagttctcatactcagccaacaacggtatgacttttagttagttctcactagagttatggagtatatactccaaatgaagtcctgatcttaaccctactggcttgcagtggaacagtagctattataatgttccgaatcgagatccaagctacatggtggagtttcctgatgttaaaaaggataaaaactctatcggtgaatggaatttggttgagtatcctcattcttcacgtcaacctaatcatcccaacaagtattgatcctttcaaggtaaacaagttctacttttctttaattcctatcgacacgtttattttaatacccgtgattcacgaaaacaggacaatacattttggcaggaacccagattgtcgatatgtcatttgttcatacccaaggcatcctcaattctagtgataccttagaaaaaccacatatggagctttattatttaaatctttgataccttcttctgtaattatgaaacacagataattatgtaaattagcaggcaatggagtaaatatggtgacattatgagtcactgatctgcctaatggagtttgatgatacaacaatgaaggaaggtcatgtgcacttgtgtgacgtgagaatatcctccggcttgtttggtctttaaaaggaaaggacaccacaataacaattatcaattagaaaacaaaaaatactccttttattcttagtcaccaaacaaataaaatcagctccttttttcataccacacaatgggaacaaaagcaatgataaaagaagcccatcaccttcctttgcttttaaattattcataatttatgaaagaaacaaaaaaaattattatttttatttttgcttctcttccggtaagtcaaaggagataatattaagagtttagatattaatctcttaaattctgtgttcattttaagattttgtagcaaaagtttattattactaatcatgtggttgtactgcatgtttaaccaacatgaaagaatatgtattcattttttcggaatgcgaaataagagaatcaatctcagttcagttcaagttcgaatctttgaacgacatgcggtttatataaaaggaactatagtatataaatatatatttatatatatgcctcctttaatagattttcttatattccttctttgttttgtaatttatggagaatatttactatgtattcttcatgaagcaattttacaaatattcgaattttaatttttccttttttgaacgtctgatgatcgatcattcgcgtgcacaagaatctcatcagggcatgatagattcgaaattttgatttgctcagttacgatatatctttgattattcttcctacggcggtttaaacctaaaaacaagttttcatgttttattcacctagattggtttcaagtgtattttctaaccactatttttttcaagaaaacgggaaacaaacagaaactatttctggtgcaaaatatagtctgaaaatagtagaatgcaatccatatcaatcttgaaagatatatttttttaaagtgtacttgagaagaatgtaagaaataagagattaaaaaaggtacggagaagataacgagaaaagcaataaaatgcataacttttgtagtcataacgaaaaaaaggagaaagaagataatgaaaatagtggaagatcggtgtcttcgtgatgaattaaagtagaattgtgtgtacgtaacttttgtaatcatactttctttttcttcatcaactataagacgtaacaatgatatctataatgcatgcatatagttttaaaattatctaggttcttgaccaaggcttagttagctcggtaagtttctaagaacttcgatttaccaataaatcaagccaaactatatatgatctttcgcgatgccaattgatattctgacaggatcatacaatattgttgcttttcttgtatttatttatttgcgtatcaccgcaccgattcatatttattatagtatatagattggaaaaacaatatagagggactctttattaaagtaaaaccaagagaggaaataaaactgaataagaaaataaacaaacatgcttgtctttgtcgaacacacagatttttattacacaagtggttccgaactaattaagattcctaattttaaaataataaagagatttaaaaatgttatcttttgtgtttggtaggccattaaagctccaattatttgtcactaagtcagggaaggagactaagcataaagacgccactgcataaaccttatggtcccctcaaaataaacctaaagttgtaaaagaaagaaaataaaaacataacgttgataaaataaaatttgaagaaagaaaatcctacatctttgtaccacctatatgaacctaacttatagggaaaaagacattgattcttttgcagacccatcagcgtgcatgtccaaaaagatgtgaaaatggtttcgaaaattatggattggtcatgatcagttagacgataattcgggctatgattatgaatatatatttatatttaaaaggatgaatcttttcaactttagatattctaattatagtataaatcatgatcattttatcatttacgacatgtttaaatcgccgtaacatacatagaaacatatgaaacgattttacatatatgacaattcaatttatatatatactacaaaacgtacggttctatatacactacatttatgataaacttcgaacttgtctatagtttaagaaaatctgttgctgctgtcaaaagcactaaatctttgatcaaccaataaatcaaaagtttcccacgataccaaaatttaaagaaacgggggaaaagtatatttgttctgttaaaactatttattatttgaaccctaaaacataagactctttccaattctggaatgcaaataaattatacaccaccggaataatcgactgaacttggtacgtgtcgacatcggaaggtatttcagctcttggtagatgacatcacgtcgtgcgtacctcagaaattaaagcgcacgataaggtcaccttctcggctttgccaaagatgcatctctctcttgcgttttgtttgtcgttaaacgtttcgttcctttaaattgattgtgattatttcttaataaacttgattactattattaattctttaacttaaatattactctaatggtgatgccgtgatggtcacaaataaatgaaatagaaaaagaccaaaacaaaaaaaaaaaatccttttttcctctcttttacatgatgggaactcttgacctttaagttttttttttttgtgacaggaagtgttcaaaggaacgaaatacacttcttcttccatttgatgtctgtggtccgaatgaaaaatatctctgtattaaccagaaacgtgtttcataagcatctttaactcttcagctctcaaattcttcatgaatatctctgcttatcgatcaaggtttgttaaattttccctccctctctgtttttcacttgaaacgtttggatcttggagaatttggagtttctcgtgtgttttttttagttccaaactttatattagttttaaaaatgattaagagtttattctgtttatggtttgtatcagtgagagcaaatgcaatttttaagagccagctattggatctataactgaaggtgaggcaacacaaaactttcttttttctttctgctttgatctattcttgtgcatgtttttgaaagattctaaattaccaactatgattggtttgatatgtagaggatatatatagagatgatgagttcttcttctccaacacaacttgcatctttaagagacatgggaatctatgagccatttcaacaaattgtcggttggggaaatgttttcaaatctgatatcaatgatcatagtcccaatactgctacttcctctattattcaggttgatcctagaattgatgatcacaacaacaacatcaaggttaactagttttcttctttcaagattcattgatttttgaaagttgttgttacttgtttttttactaatgggtttttaaatcacgtgcagataaattatgattcttctcataaccagatcgaagcagaacaaccttctagtaatgataatcaagatgatgatggcaggattcatgataaggtttagatcaaaacaaagctaattatgttttcttttttatacatgcataatagaaaatggtggtttttgtgatattgattgatattcttttgtcatatgccaatagatgaaacggcgtttagcgcagaaccgagaagcggctcgcaaaagtcgtttgagaaagaaggtagaagcaagtccctttattgaatctcatatagtttagttagttgctactaagtcctctttttttttgtatctttaggcttatgttcagcagttagaggaaagccggttaaagttatcgcagttagagcaagaactcgaaaaggttaagcagcaggtgagctaggtcaaaagatatgtttaaaatgttctgttttgagtctctatcaagaaaatcagttttggtttcgtaattgactcagtactaaatgttttctttcaagggccatttaggaccatctgggagtattaacacagggattgcatcatttgagatggaatattcacactggctacaagaacaaagcagaagagttagcgaactacgaacagcgcttcaatctcatataagcgacatagaactcaagatgctagtagagagttgcttgaaccattacgctaatcttttccaaatgaaatccgatgcagcaaaagccgatgttttctacttgatatcgggaatgtggcgaacttcaaccgaaagattcttccaatggattggagggtttcgtccatccgaacttttaaacgtaaaaatacccaaaatgttacaatctctaacaaaaacattttcaaaatgtaatattttctccttcccttttcttgtaggttgtgatgccttatcttcaaccattaacggatcaacaaatcttggaagtgagaaacctccaacaatcatcacaacaagcagaggatgctctgtctcaagggattgataaacttcaacagagtttagctgaaagcattgtgattgatgcggttatcgagtccacgcattatcccactcacatggctgcagctatagagaatcttcaagcattagaaggatttgtgaatcaagtaagtagtaaacattaactcaaaacaaattaagtaaagtttgtgtcattctatttcaaacatctctatcctgattataacaggcagatcatctgaggcaacaaactttgcaacaaatggcgaagatcttaacgacaagacaatcggctcgaggtttactagctttaggagagtatcttcatagacttcgtgctcttagttctctttgggcagctcgtccacaagaaccaacttaaaagaggaacttattaaaactttaaaaacaagaaacagcagaatcaaaagtcttgaagaagcatactcatcacaaagcttggaaggatgttttaaaaaagatctttgttaattaagtagagtgagattctcttgattagaactttatggtttttgctttatgaagtatctctccagagaagattgtaaatttgggttgaaactttgtaatatatttagatacaacaaataagtttgaaatctgagcaatttgataatatgtgtactgaatgtatatttaatgtattattaagggactaatgtgaaactcaataaatcaaagggtactattgtaattttcccatcgttgcgcttcagtcgtccacaaaaaaacttccgttggaattttctgaggaaaatgagaaaattcaattgaagaaaagagtaaagaagaagtctcttgttcggttggatttttcaggaatttcattttcgtgagcttacttgttcgttcatataaagaggtggaatttgatttatatgaattttgatttctgggtttacgaaattgatcggtttctgggttggaacttgaagttatgagcaatcttcgagctatctgtagaccatactctgtgttctcttcgattgtgtgttgtagtagacatcaaagtcgatcactttttagggtttcgattaaaaacgtcgcctttagaaaccagagttcgaattcgtcttggtttaggtctaaaaattcgaatctttggtttcgtttgaatcagaggaagactctagttagagcatcgaattggagccaagagaaatctccttacgatactctcggtaagcttcttctaccaattcgggaattttatgtatcttacagtttcctttgatgtggttgttgattcacaagtttgtgattctattcgattcattggagtggttctgttgttttggttactgtttgtgacttgtgtcagaagaatttgacaagaagtctttgtgttgtgtttcgtgtttctgatatggttctatgttgtatgaatttgagtaacagagttggatagaaatgcagaggaagaacagattaaggtagcatacagaagattagccaaattctatcatcctgatggtacttttctggatctttagagcactttgtcgtcacaaagttgtaactctgtttctgattctgtattttgtttgtctagtttatgatggaaaggggactcttgaagaaggagagacagcagaagcaagattcattaagattcaggctgcatacgagctgctcatggactcggaaaagaaagtacaatatgatatggataaccgagttaatccgatgaaggtatgtatatataagagtcataaacttgaagttttcttttttccctctgaaattgttttaaggatgacatgtgttgggtttgtgtaggcatctcaagcttggatggaatggttgatgaaaaagcgtaaagcttttgatcaaaggggcgacatggcggttgccgcttgggctgagcaacaacagcttgatataaacctgcgtgctcgtcgtctttctcgttctaaagtaagaaataatgtgtctttttgagcttgttcttccaacttagtaactttcttctgctctgttgtgaatcttgaaacttattaaggtggatccggaagaagaaaggaagatattggagaaggagaagaaagcatcgagagagttattcaacagcactttaaagcgacacacgctagtgttgaagaaaagagatctgatgcgaaagaaagcagaggaagataagaaaaagctcatcactcagctattagcagcagaaggtctcgagcttgataccgaagcagaagaggaagaagcagcaaagtaagattccaaacattttggaagcttctatagctacttcaagtaattaagcacatggtacttgctccctctctgtctctcttgtagtataaacatacatgtagataatcatatttgacaatttacaagatcttcactgcacggttcattattaaaaataagacaagtaccaatacatacatcctgagaaacagaacagagaaacatcaattgcaatgaccaagaagacctaagcagagcaaatcagacggagcaacaatgagtagggcatatacccaaatctttaatataattatcatattataaaccttaatttgggcaaatagccatttcagccggtaaattacaaccactttctttcagtttcggagattataggaacatgaaaataaaagaaaccaccaaaactaaacagaacggtgattgagaaatcagaacattgatgatattttagtgaataggttaaacatgttgaaggcttcaaacttcaacgtaacttgccttccaagaaagaaagttgcctccattcaagatagtgatgatcatcaacaattcttaacatccgaatcccgatcatcatcttcatcaagagagacgagctggatcatgagacgaccgttggatctgtgagctcgaaaatactcgttgcgacacactttctcttccttgagtaaaagccgaccatcactcgtgtactctcgcttcagcaccgacggcacgtgcgacggcaacattggaggtgacattatctcacgcgccactgtctttttctcctctcttctctcacatggcaacttgacatcaccggtcttgtcggagaaagcgttgaagcagctctcttttccaatgtagcctccgttgtaggagagagatgacatcacgatggtcgagttttcttggtagtgagaactgagagcgatgttaccaaattttgaaagctctctctgtgtctatagatcgagttagtgaggttgagttaaataggagttagattcatccattcttttacttacattttggaagttttctttatgagaaactaaacgatgtatacagagaaagaaatacgtaaaaagaggaaagaaatacagaaacacatgtgaatatctatccattagttaaatggataaaatgaccaaaacaagaataactttgtttcaccaaatgaataactatacaccttgacaacaacaactgaacaaaaacaatggtttatttgtctccatttttgtcagatgtgtattttgacacatgccccttttttggatgatcatatccgtactaatcaaatactataataaaaccatgacacacatgtctctactacgttactatccagattcaaactaacatgattgtgactacaatcaaaccagtattaggtttagaaaaaggagtaatttgtatttgatcgttttcagtagtaagcgaccttcctgtcaaacaaacttattggcttattttcaagaaccatgatgagaaaatgcgtaaacttgtgttgtaagctgcttttaaagaaatttcttttccggtcctcaatataagaaaacttgacaaagaagaaacacaatgtctattgctcataaaattttgagagactcgaatacaaagacgggtaaaaagtctgggaaaaataaaatctgaaaattgtatcactggtcaccaggaattgacttgataatgtcagaatcacctgaaacaagtcgaaagacaaaatcattagtagatctatcaatgaagaaccagcagcaatatataagcaagtagctagctcttttaccaggatcaacaatgctcagacaagaaacacggaagtactttccgcaagctgttcccaaatcaacgttatctgaaagccattaacaaggagagaagaaaaacacagttaagccaaagtggtagatacaagaggaataaccgatgaatgagcgttgaaacatgaaactatgttcaatagaataaacattcatctactttctttgatgaaatcatcaagataatgtattaaaacgctccttcgagtattatcatcgagcaagatcaagttttgtctaagagtcaaaatctaacaatgcgaaatcatagaccaacagagcaatctttggtattatgaaccatgtcaatatttgcaataaccacatacagagacaccaacagcagttcaaaccgatcgtgaacttgcgaaagatcaagacttcacgtcaatatacattacagtttcttcgacttgagatcatacttccatcatcagtttaatggtctatagaagcagattttaacactttcatctacttaagattatacattctcagttattatacacaatgaaaaccttcacaaaaacaagagaacaatgaatctttaaaaactggacgagctaaagaagaaaggaacttacttccattgtaatggtggacaccaactttagcgagcattgcgtagtactcaatctctgatcttctcaacggtgggcaattggtggagattagaatcagtttccctgtgaacataagcaaaaaccagaatcaataacaaactacaaaaagctaaaacatttaggtatgcagaccaagtgttcgacgcaattacctttggagccacggagggatttgagaacagacttgtaaccaagagtgtatttaccactcttcataacaagagccaacctactgttgataccctcatgagacttcttctgcaattaagcaataaacccagaaacatattagtacattgagatcgtaaacgatatctagatgatgaggaaaagggataaaactttgatgggagagaataaggcgcaccgttttcttttccgtcaccattttcgccggcgatggagtgtaatcaaaatgtcttggatctgtgcggtggaggagaagaggagcacgatgaccaaaccgaaaaagcgccgcttcgtcacctttttatagtccgtgtcaattttctagggtttttgctcttcaatttattggaaatttcaattatgcccttaatgtttctatagttttgtaatttgtcaattaaaaaagtaattactcgatttattcgtttcagtgaattgacagtgattaaattagcataaaccacttgtacattcaacattttgtcgacatgaaacgtatttgaattactttttaatttacaaaatatgcagaaataaattggataattggtaaacatatattttttatatttttttttatacttttattagattattcaatgtttcaagtttcaacaagttttgtttgtggatgaaaaaaaattcaaattacttttctattttctttctatcggattcaacgtataagttgaattctatagaaatggaacgaactgatcaatctcagttatgactagtgtgacaaaagacaaagtttaacaatatttatttaattaagataaattgctaattttaagtgttagattttggtagacaaatattaatagataaattataattaattatcttggaaattaagaaacaagtaatcaaaagtggtttaatttttattatgatttgaagaattaatagaataagtcgaaagatgtaaaaatatttatatacacagagcaaacttcacattgaagatctctctcttttttccccctctatgttaatatcattccccttgtcggcacgtaacaacaacgaccgagacaacacaaacaaacaaatcccccacgtgtcgtaaactgagaccaggtggtcgtcatgtacaatatttctataaaatatatggtaacatcaagaattattccatagagccctaacctaatttgcttccttttgaagctccttcatcgagaggcaccttcgttataagcttcaacttcactcgctatatgtatacccatcatgtctctcttacaccatctaatatctcatacacaccattataatgtgtaatggattgtgcttgttttgttgggttaccaataaattcaaacacatgtacatgttattgacaaaaagagaaaacacataaggtttgagtctttaatttcacagaagagaaaacacacagtgtatatacaatgtacaaatcacactagctagaacaagctatatataaaaattagaggcagactaggaaatatatatgtgtttgatgtatttactatatatattatccatacgcatacgcacccacgtatatatgagcctttaggcaagtgccaagaaacctataatgttaaatatgaacattgaataaaatacatcttttttttgggttaaagttttaagtaacaacacttggttatataataagagtaaactacatttttacaaatattatataaaatgagtataaatgtaagggatgtacctagccatatggcagattcgtctaaattaagatcaaaaattctatccgctcaccatttgtaactctctctctctctctctctctctctctctctctctctcttaacacaaacctaaaaactctcctttcgtcgactcatttacttaaatatacaattttgcattcgatcaatttctctcgtgccaactaataatagattgtgttttgattattttgcagtgaccatcggatatgggtcgggttaaattggagttaaagcgtatagagaagagcacgaaccgacaaattacgttctcaaaacgtaaaaaaggtttaataaaaaaggcttatgaattgtcaacactttgtgacatcgatcttgccctcctcatgttctctccctctgatcgactatgtctcttttccggtcaaacaaggtatgtccatttcttcttctagaacgttccatgctcttctagaatcttctccttaggctttttcatcttaattaaagtgtaaccatgttttgcatatacatgtactgtccatatcatttgattaaaagacaaaacggacaagccatatattctttttatcaaaaaaaaaattgttggtggaagccaccgaatagtggatctgtattttttgtactacgtagtaattttgattttttcccccactgctttgttattcagtattagaggtgcaactgagggttgacacgtttttacatattactgaagattttagtatataaaagttgcagaacatttcaaaaatagtaagagtttcaggatttcttatgtaaatagaaaaaatcgctgctgcgcttttctataaataacaacagagttcggggttatttagtaaatagtaaaggtatcggatgttttcggtaaatagagaaagttccgaaatactttgtaaatagccccggaacttaaaaaataaagaaacagtccgcaaacaatctttaatttttgttgtcaatttgttacaaaataaacaaaaaaaaatcattagaaaacaccacaaaatcaagtgttatattagctttccagtcgatttaacatataaaatttccacttgttaaacattttgaaggattttttgataaattttcaccatttgctattacaatagtatattatttgttattccgacatggccatgctctgctctctagtcgatcaagttcgtactatatgtggcactccaaaacgaaacacgtcgtgtttcagtgacatcggtacatgcaatgactcagtgtgaggcccatcaaataaaacttatcattatatggttttttagaaattaaaagttgaaaaacaatttcttcattaattgtaaaataagaaaaccaaccgattctacttatacatagcttcttctttccttcattcaccgggttgctcccaccgttttctctataagacttggtttgttctctgtcttcttcaacgatacataacatctatgaaaatatatgtaaataaacacatgcacgatgttgtatctccataatcttagtcttgagttgatttcaggatcgaggacgttttggcgaggtacatcaatcttcctgatcaagaaagagaaaagtatgtctataatcatcgcattagtgtacttggtttattaatttctgtatccacatgtaatttatttttgtattttttgataaaatttcagcgccatagttttccctgatcagagcaagcgccagtgagtatcatataattcaatttaatatactagtacatactttatttcatatattgttgtgttactcaactcttcttctctgttttgcagaggtatccaaaacaaagaggtgagactaatcccataaaaaaaatattagtatattgggtccataagctgttaccaagtgtatgattatattctaattacatatgaatatttaagttttttttttttgaacaaagttgaatattttagtgtttaatcagcatttttttttttcgtgtgtgacagtatttgttaaggactttggaaaaactcaaaattgaggatgacatggctctccaaatcaacgaacctcggtttattcctcattaatccttataataaatttgtttcatcttgtttatatgttttaagaaacaaaatctgctagctaatctttacctcatgacactctggtacagtccagaagccaccaactccaatgtcgaggtggtataaatttcacaataattcctcaattttactaatttcacaaggatttttctaattatatttaagtttttaaaggaacttgagcaagaagtttgtagattacaacaacagcttcagatatcagaggaagaactcaggtattttccttcaattagtcctatttaatcaatacgcttttataatcaatatgtatatttaagattataaaatatacataggaaattcgaaccagatccaatgaggctaacatcaatggaggagattgaagcatgtgaagctaacctcatcaatacgttgacacgtgtcgtccagagaagggtgatgcatattaacacaatgtctgttatgtaattgcaatgtaagagagggaatattgataggagtaatttgataaatgcaggaacatttgttgagaaagtcctgcgaagcacaaagtaaccaacaaagcatggacgggatccttctaaatgacatcgtcgaggattggggacctgagcccgagcccaaacaagcccatatgatagctaattcggcccatcattcaaatcagccaaggtcaatttaattcaaccttctttttatttatggtttaattattttaaattataattgattttttttttttgtctgtcagctatgatttactcttacgcaggagtaattcgagttcgaaccaaaatccaaaatgatattaggtgaatcgcaaggcgtcgtcgagccctgatggcaagagaatgcatgttataagacaaaaataaacgagatatctcacaaatgggtatgtacctaagcttctacgacttctctttcaaattatggtttttgtgtacaatgttttaaaaaactctgcttgctcaataaatttctgataaaatgtttagaaccattatggattcgttttttttcaaccagtatataaaatataggtcatagtgagatcagaaatgttgatttttatttggatttgaaaacctgtttgactagctagaggcttatttctttaaacaagtctcaatttattttctgcttattatcatagcaaataataatatttcagattgtgcagtttgtaactcaagtcttaagaggtaattgaaatgaaaagaaatcagaatatgagttgctatgagcctatgatattacattggctcaaaaatgttatagcaatggaggaaaagaaaaagaaaaagtacaagataacctgtaaaacaaggtgtccacataacgttgccacgagaaatcacaggtaccataagagagaaaacaagaaaagaagatggagcatcatgcaccattaagcatcataagctcacttatttaaggtttgaggatagatctgcagcaacctgtagttcaaaaattaacaaatcacgaattaatattatagtttttttgaacaaccattaatattatagtcttaaaatcaactaaaactcactaaatctatcaacaaacaatttttggttttaaaggaacgaattacctgttatagcgtcatagcatactttctcaagtgtggatcaatacataaaccgaagctttcgtatcttggatcgtatatagtatttgtgcccctgaaaaatggatgctcttgttatgttcctaagaataattttgagatatattacctatgattacttaactagttaactgtatcagattaataaataaaaaaaaggcagagtatatatatgaaacaaatatttgaaaaatgtgtgataagtcaatagaaaaaaatggagaaaaaataacctttgttcagcatttccatgattgattgaagttgagccaacattttcgcttgctggtacaattctctgcattatttgatttaactcatgtttaaatttctttttcatgaaattttttctacgttaaaaaaatttgagactctaaaaactgtgtacccttcgttgagccgaagatgatgatgattgtccaaattcaaatcgacttgggtaacttcttcgtcgacatcctaaaatttcaccctgtaacattgatattaacaataatgcttttgtagtgcatgtgtattcatttgtgtaatattgatgaaaacttcatataaatacattattcattgcataaaagaaatagtacctgtgggggtatgattgcgtttgcgtttggacgtacaggggcctgacgattgttaatgttgggtaacctaaacctcaatggagactgattcaccgatgtttgcataccgccatgttgcctataacaatgaggtataaaaagagagaattagagttttcaaatgcagcaatcaaaaacatatataagaacacagaaacttaagttctctcttgtgctaagtcgattagattataacttgttacctggtaaataatctagaagacatttgaggtcggggtatggtacgttggggaacagcattaaagggagggatcatatttgtttgattttgtaacggatgtatcctggtcctgcgtgaatccaatatattatacttgtaaaaatatactatattgttttgtaaataaattaaaaatggagtcaaaggaatatttgatcttacagagcattattgttaaccatccttatattgggaggttcattttgcctacggacaaacactggtgggcgcggttgctgtggatacatgccaaaggaagaactgacttgttgatgaggcgtctgatatggcatatagttctgtggcctatatttcatgaaaatgatactcttacgaaaactttatagatcaatgttataagcatacaaagtgttacatttgagtagtagtactagtctcattttggagtgagatttttgggactatatggtacataattgctctggactcagacaccataattagattcccaatcagaagcaataaggtatttgataaacagaggctctataaaccatttcagatatgtagtgactactatatttagcggatatactaatatggaataaattttagataatgtacctagcggatcccatagtttgaggaaaaagtgatccaaatgcattagaacggtgttgaggtatcctgcatcaattcatcattttttttattagtatgagtttatgtaaaaaaaatagagttttctattatatgatagaagtgtttgtaaatcaattaatctcatacaaaggtactggaagaaaacggttttgaagttgaagtggagaattcgtcacagttggatgtgcaaatccattatttgcttgcctcacttgttgaccaatctctgtttggttctgaaaaaaagtaaataaagaataaccttaaaatataatatagtaaaaaataataattaaaccactccaaagaacgttttctacccttgtaaaaacactcgactcctgctgaatagtattcaacatgtttgataacttatcctgtaaccacgtctcatgcgaattgattagttgttgttgttgttgttgttgtacaacacggtgctggtgctggttctggtattggtgttggtgctggttctggtattggtgttggtgttgatgttgattttggttttgatgttggtgctggttctggttctgattctggtgcttttaacacaaaatacaacaaatcatatcattagtatactatcagtatttgcctagttggtttagatgtcttgctctatgtcaaagtgtaagtaatataccatttcaagtggttttggtaccagagttgatgtctcttgatatgtgactagatttgattgttgagaggataacaagaggttagtttcgtctattgtagagacgggtaccaatccaaaagggtcaacatacggtttttcggtttctactgttgaattcggcaggcaatcctgtaaattaaattgtacgaatccaacagttttatcattaataaattacaatgaaatccatgagagataaaaagagaagcataccaataacggaatacacggttccggtgattcaagaaaacataaaggactcaacaacggcgattggtcatcgaacatatcgccagacatgtttatcgaatatccggaacacaaggttatcctaattggaagattgacatcgtttataaattaaaagatgaggtggaaaaatctaaacataaaatgctgatgtcacacactagagagaataaaataaatcatctaataaaaatatgaaaatagtctatatgttaaaatatattacagttataccattactatattacagttatgccattaatatattacagttatgccattaatatacttattttcatatttgtttttcaaactttatattttgaggaagaaaaaaaacatttatagtttatacatattttttaaattataacatatttctaatttatatattaattttcagataaaataatattagtttttaactatttaattttatttaagtattacacatccaaaaatatgaaatagccaggctcatcaaacaaatatgttaaaatgaaaaatataatcatcatttaagacttaaactatactttacctcaccaaaaaaaaaaacttaaataggcagtccaaaaatggagaaattaataactaattttagtctttagacataaaagcattgtttggtatttcacaggtctaatctaaattttctttaaaataatgagatttagtgtgatatatgaggaaagaaatctggagataatgattggtacattgttctgattggattctaccaaaataagtcatcactgaattgtgaaaatcccaaatgtcagagctctattgctttctctagattttgtggatgtgtttcattaaaaggcttttgccaagtttctacatcactcatatcctcttaaaataataaaatttggaaataagaccactttttcgaggacaaatttgaaaataatattgctttcaatgcaaaaatcatccgtttcatcgttttgacggtttttcgttaagctataacagattcaaattcaaactaccttcttcaagagcaaaatctattttgtagtcattgtgaataatacatttgatacacactattaaatttctgtgaatttgtttaacacatacaactcaaattctacatactaagttactaacctttctttttttcatatatagaggacagtttttacgtcataccacttcatcgtctacgtaaggttatataattgatctctatgagtatatataagattttttttttttttttttttttttgggggcacaagtatatataagattgtctcacaaatttcttgattggtccattatttatagaatatattgactttattagatactacttttttgtcaatgcatcttaattagtggataacacatacgagtttgaagttcttagaaaatttataataaaagaaaaaagcctaaattaatattttatgttttttttcccagatatcacacaaatttatggaaaccagtgttttttttttaaaatagaaaaatgcatatgttactattagtcctgattttatttgttttatttttttaaaggatattagtgggtctgcgcacttatagaatgttcgtatatacgtatggcgttttattctcttttaatgaattggtgagagacatagtctcctcctattctaccaaaaaaaaaaaagattaatatagaggtatatgcatttgcatgtattacaagtattgagcaactgcacccactaaaattcgatagatcaaaataattttctaaatactaaccatagtgtctccactagaacgtttaaacccgcgtacgttagtgatatcaaataaaaaaactaaaaattttaaaaaatcactctttccgttttttgtttttttgttttaagttaaatttctctttcaactgttttatacttaaataagtccaaacaaaattatgattatcttcactcaaccaaaagttgaatgatcttttaaaaaaattagacaagcaaaattgacataatcatatgcatatttgagagcaaaacatgtttttcatgttttatatacataatatatagtatatacattgtttaacagtaaaatgttttttttataatagaaacgttatgtacaatatacaagtcaataaaaggttaaggtcttaactcttaagtgtggaagttgtgttttatataaacatatatatagtaatatcttgtcttcatagataaataaaaccgtatatatattgttaacttttctaaaaaataaaagaaaaaacgtataaattatgtcaataatatatggtaaaattgaaattccttgagattattggctactgagctgaggcattcttatatcatagtcggagacctcgtggtctgcttgtgcatccttcttcataaccggtatttcaatttcttctatattgggatcaaccaccagtccatgctaacatatttaaaagcaaaaaaaaaaattagtgaaacaattttaatttatttcggaaaaagagaaaatatagaacctgatgctgcataggaggaaatagagtcgaagggttatgggccgtagtagaattataggcttgggcccattcttgaaacatgtcaccgttatgatttgacacattggattcacccataatgttgttttggttcgagcttgagctacttccttgcaataaagtttcatacattgctgaatgtgccgatgcgtcgaataaatgggcttcgttaggcccattttcagtcagccatcctccaacgacgtcgtttccaaaaggcccacccatgctttgctgttgttgtaaagcagatgcttcatatgaagataattggtcttgactcaatatatgttcctgcgtctcaagaaattatttagttactaatagatattgttgaatacattatgcttagaaaaaaataaaggggagtttaaattattgacccgtcgttgattgacacgtgttaaggtgtccatgagctgcttctcacaagtttcgtactcttccattgttgtaaacctgattggatctggttcgtatttcctaattatatatataatttggatataagtattagttacataaattttcatacattgtatcacattcactgtgtttttggttataaaaagaagaccttagttcttcctctgccatgagaagttgttgttgtaacttataaacttcatgctcaagttcctaaaattgatgattagagagtaaataacataaagtaaagttattagctagaggaaaaaaatagaagattcacctcgacgtcggagttgatagctgtagggcttttttaaaatcatccaataagagaaaaataaagaaaatcaacttccgaattattgcaaataacgtagttatataataatgaaagtagagaaagaatttgagacttggtaagttgaagagcaatatcattctcagccttgagttgctgcaaagtccggagtagatactgtcacgtgacaagaaaatttcgagatcaataatctgaaatgtataattgtccttcattgaaaaggagctaggtatatatacacacatgacacatgcacaatatgcttaatctaattacatacctctttgctctggaaatctctgcaagatagagttgtcaaaatatgaaaaactcaattagattttgatgattataaatatacggttattatatgtttaattatttatcggaataagagtaagatacatacgggcgtcgactttgatcggggaatactagagcactaaaacaaaatgaaagagaaatattaagaacaaatgagtggaatatctttagagaatctattaaagccttgaaaggtcagcttacttctctcgttcttgatcagaaagattgatgtatctagagaaaacgtcttcaatcctgacaagagtttaacgaataaatatagatcaaatgaatgtttccatgttttgtacaattaaccgaaagaaaatgttataagacaacaacaacaaaaaaccttgttttgcccgaaaagaggctaaggcgatcagagggagagaacatgaggagagcaatgtcgatgtcacaaagaatggacaattcataagctttctttataagaccatttcgtcttttggagaatgtaacttgtcgattcgttgtgttttctattcgttttatctccaatttcactcgacccatgtctcttatatccgatcaatgcaaccaacaaactcaaagactcttctttattttggtttagggaatgcgaaaatctgatcattggaggcaaaagtgcctatatatatatgagagatgtacggacgagagaaaagagaaccatgaaagaaggagaggttaggtataagagagatttggttagaaatgtatggaagagattaagagagattaaaagggttttgttctttgaacgaattaagaatatgatgttattttttgccacagaaaattcatataggagtattgggatcaattaataacgttcagattaaccagcatatatcgtttattttgtcaataattaattgtaaaaacaaaacataaaagtcaactagtcctctttacctcgcaatggctactctctcagcatatggagaggcttcggcaatatctacttaatggtcaaatatttgactttccttcaacggctatattttccgaccgttaaacactatctcaaggtgtttttgcttaaacattgtgaattgttcgtgatgatgttcaaagtggaagattcatatgattattcactcaccaagacaccaatgtaagttctgattccaattcactgctatatatatccttgtattattttatttatttttcttaaaaaaacacttaggaatgtaaaccaaaccaaaagatgtaaaaaaaaattgtaagccaaaccaaaagatgtaaaagaaaataaaaagaaaaaaagaaaaaaaagaagaagaatattttgtagccttatgcattgaaatttgtactttttagtcaggtgtacattaaataaaaactataggctatatgagaaaacaataaaattatcactaggttatatgtttgagttgtactgtttcttacatatatatatcaacacaactcgtgggacgtagatcttgctcttacataaatatctacggcttctcctactgtcatatatatattttctgtctttattttctcgtccaattttgctcgcttcaatttgtgaagtaccctccatctgggactagcgatgactaactgcagcccacaaacataaaacaaatattggtaatttgaaaatccaatgaacccacatatgtaactatagtgaatgaataacatttgattgagaaataaagatgtacccggatgtcattagaagctagctcttgatgtagttcttcaagtgcaaatactcctgatgtatctacgcccatcacgccttcaccaatattttgttacatgtaagattcagtacctctactatatatacaataaaacattttctataaattagtatatcatgatagaatgtgggatgtgcttacaagacatgtcgagaattactacttgaagaccattttcttttagaacttcttgttcattctcctctccttctatttcttgaactgaattcaatattctgaaagaagaaaaaatatttattttttttgtcaaactgataagagtttcacaagagtaactaatgatgtttgaacaaaaaaaaaaaaaaaagaagaagataaatattgattaatgacctgtctcttataaaattggcattagcaaagcatagcaaaggagaactgattcgaagagtcaataatcctgcagtcttatttgccattggatactgatttatgtcaccgaagatatctgtttttgataacctccctaaggcctcaatgcttggtcttatcgaactcaacattattcttgcaaacgatatccccacctacatatatacaaataactctgttatatacatagtcttatccatcaaaattcacagtgtaagatcacaactgattaagctgatcaaaaggataaagatcgatcacaagtatccattctcacagccagtttttcaaaggtactttaaacatatgtatttgattttttgtgtacttatttgccacttgaatgaaacagtatacattattgattgttttgtcgtacagggtctgtctatgcacagcgaatttggtcggcctagtagcatttttatatagcagttttattggttagaaaatatatgagatatcgacgcttttgttgtctataggaataattcacatgattgaatataaagagttttgttgacttcctcagggcatcaatcaatcttgagtaaaaacaatagtttcaattatatagttaataaactagatcataacccgtgctattaatattttgtataaattaaattgtatattttgttatgtttgttatgtttgtcaaaattatttgttatatttgtcaaaatttagtaaaatatattcaaatataattaaatttattaaaacttaataaatttaaaagttttttttgtttggagacgcactatctacatacaaaatacccgtttctatttttttgagtatttttagggcctgaaactttttatccaaactgactcaaacccaactggaccgacccgaaccgaatatttagaattattctattaggtagtaaatcatatacccattaatcccaaacccgaacgggttctacccgaactcgaatgtgttactcatatgcccagccctattctctgatttaattatctaaaaaatcccaataaaacatatgttttgctgactactttttattcaaaaaaatttacatcctcttttgccaaaatcatttcataagacatcccaaaacccttggaataatgattccatgaatgaagaatcctaatttgaatataccaagaggttttgaaaggttttaagtttttgataggtgtgtatgtgagaaggtacatccatcgtgatggtaatctgcttatttataattttaacttgcattatacagcaggtaggcttatattttagttaaactaaaaacttttattgtaaagttgattataaatatatgatattattttatttgattttaaatgtatagtaaactgcgagttgtatatgttttgttgatattatttatattgtttagtgtttaaaattatatacttgtattttgattgttaattttagagtttcacctgtagtataccatcttgtattaatattgatttaaacccgtcaattctaggatttttcagcttgtattaaaaattgaatcacatcatacacattaaaaaatctaatatgttattaattattgtagtatataagattataaattttaaaataatatgtatgaaattgaatataaatattcaaattatgacacagtactcagtaaaaaaaattcttaaatctacttttgacccgttatagtatttttcatgtattgaacagtttatattcgtttttaaaaattcaaattgtggcatatgcgaaaaaattctaattatttttttataacgatgatattattttttcgcaaaaatagaatcatataaagatgagaggtgaactataataattaataaaaaattaatatgataatttagatatcaaatctaatttgttgattttaattggttaattttttggaaattaataatgtatttcgtttttgagttaaatttaatgaattaaattagtatttgacttttttatttttaaagaaatgaattaatttactctttaaaattttatttctaatggcatacctatgtaattatttacaaaaaataagattatatttaaaatgtagtaatacgttggcatggataaaaatctaataaagcaagaaaaataaaagcagtgagggataaggaaaaactcacggcgagaagaagaccgatctcgacggaggcaaagaggacgccgaagaaggcggcaatgaggacgagaaaatcgagtttatcgagtttccaaatgtgtaaagcaccagagacatcaatgagacctggaagcgccgagaggattatggaggcaagaatcgccgttggtgtgaagtagagaaacctcgtcaaaacttctagtgaaatcatcactgtaatcgccattacaatgtttgaaaccaccgtctcgcaaccagcactgaaattcaccgccgttcttgagaaagaccctgttttttcatattttatccaaaattatctataaattacatataattacccgaaatacttaataacacgtgttgtaacttagtgaaaatttcgattatgatttgaatatatgaaatatccgactagaatttatagcgtacgcttcaaataatgaattttatatgtccgaattatccataccaccaggataaatgtacgcttcaaataatgaattttatatgtccgaattccaccataagtgttaatacacaacgtttataaaaaatggacatgcctaattttaattactaaactgggttaagttacgcaaaaagacaagaagatcgaaaagaaaagtgaatttaccggtagctacatagcaagaagataaagaaccagcgatattcataaatcccatagccatcatctctttgttcccatccaaacgatatcctttgatcgtcgcaaacgatcttcccactgcgattgcttcctgtattatttcattcattttaaatcaattaattactgattgatcagtgattaataatttataagtaagagcatatatttattactaaccgttagggcgatgattgcagaaataagaccaattttggcgatttgaccaagatgtggacttttgaattgtaattggttaactgaaagctggttaaaccctggtttaatgtgtttaacaatcttaacccctcgtgactcagcattggataaatacactattagtgttgctaatacaactgatattagcggtgccatcgctggaatccaaaacaacttattgtttctttttccctgtatttacaaaaatcattattaaaaaattgaattcaaaagtaaaactattgtgaagtggatatacattacaaatgcacggcaaattttggtttacttacgataaatctagctaggaggatgaagatgaggaatgagctaccgatgacaaagttcagaggttgccactgaaaaaaaagtaattaagaattaaaacaaatatttaacgaaaaaaagacttgaaaagaagaagacaaaaagaaataagaaaaaacggttcgtaccggatggtgaagcgagtggaaaaccgaagataaaaccgaaactacatcggttttattggtaaaatgagtcaaaccaaataaacctttaagttgttgtaaaccaatgacaattgcagcaccagccatgaacccaacaagtgcagcatgtgacaaaaagtccaccaaaaaccctaacctgatacatcataataacatatttttatcagattaatacacctttgtcgtcgtcgttggtccaaaacaaccattataatattatatgaatctctatgcaattatttgcctgaagagtccaaagatggcttgaaacgcgccagcgaaaaacgtgacagtgaagacaatttttcggtaagcaattgggtcggtgactggatcttgaaggtcacgaaccattgacgacagaagaagcgaaactacagccacaggaccaatggctaactctctcgaagttcccatcgtcgaatatatcagaggtggtaccacacttgtatctgttatttatattattttgattatattcgctgcaaaaatataaggaagtatgcaaatttcaattagagttttggacttacatagaccgtactctggatcaagtccagccaaattagcatatcctatactctgcaacatgaaattgaaaatgtatctataactaagaatccaacattaattggtaatattgacatataccgattacaattggtgagtaaagttttttttctttttttgataaagttggtggataaagttacctgaggaatgcaaagactagcgagagtgagacctgccatcaaatctttcttgaacaagttgagtttgtattgtcttccccaactaagtatagggaaagccgatttaagacaagagtaaacaaggtttgatgatgagttcttcgtcttgttcctcttatgtttcttcttggccaagacatttgttcttatgtacccaataagctcttgccacatgcttggtggttccggcgtatttatcagccaccgtgacatgggctcttctgcaggactggcttcttcatggtggctctggtgattctgaagctctatgcccatttttttttttttatctttgtgggttattgaagtgtgtgatagggaactaagttgcattcagctctctctctagatatatattaacttttttggtcatatatatccataacttatacttaaaattagaaagaaagtaagtataattccaaactttggccctaaattttgaatataatttatatgcaataattgaaagctgttactttactgtatgtagaaaaaataaaatattactctattttttttttatattgactttagaaattaccattagatttcaaaaatgatactcctaattatgtcccattatattagatattttagactttttcttatttagtcagattttcgcaaatatacatacataatttatgtttattagaatgttataatcatttctacaatcttttttctattataaaaataacataaaacatttatggtttcttaaactgtgtgcttttatctagaaaattttataatccgagacatagggaattataggatactgaatttgtaattatgtttttagccaaactatagttgaaattatcactcatgcttgagattttgttactgcatgtaatttgactatataatttaattattatgatttatgatataaccttcttatttcctcattagactacgatataaataacaagtttccaagtgaatgcttatgtgaaaaaacataaataattattaataaaattctggtttcttttttctttttgtaaagccaataaattgttgtatatcttttttttcttccctatgtgttgttttgtttgtaattatttgttggtgcataatcatggtctagttcagaattctataaaaagtgcatagtttttttcgatttggttttagttaatatactgaaaatagtttttttttgttctttttctttttttttagcgtatacttacctggtatagtagaacatgccagtaaatcaattgtttttatccgattgtacatattctttgtttaacttagaaaaaaatgaatacaacaagagggaatgatagctttgtcgtaatatgtcacggtcataatatgaagaatattaggcaggtgaagataagtactatcttgtgactattttgtttggtgatctcggacacattgctgactgaatcaagaaatacttttagagattttatatggatcattcgtataagatcaaggggaaaaactgcatttgtctttgagattttattttaatccttcataaaatcatcttaacctctggaggtaaaaaagtgagtgcctgaccacaagaattatcacatcgtttctttaagaaatttctattcaacttttcaaactttgatcgcaacatatattaaaatgtgcgattgtagcataccaacaatgttagatgatcagaaaatttcgtgtactttttaatatttaataactagtatatacttaataaaatgctcaaaaattaacaaacaaatcgatatccaaaatatcatcaacacaagaacatatatgagctttgatccaaaacgaatattttaagtggagatgtcagcgttgccaaacaaaacaagaatggtttgatggagaaagaaggcactatactatataattgatttcgaaggaaaacgaagatgaaaaagaaatgcaaatgaaagtttgattatgcatataaggttgttcttttctttttgggtctctttttccttatctttttatatggaagaatatggaattgaacggatgtgatgtggtcactgggcatgttcggtccacattttctttttccgttttggaattttgcttacttataatcataaccaatggaatctattcatcgtacgatcatggtctacgcatgagtcatataagttgttctctatctttccactacgcatgagtcatataggttgttctttccactatgaaccaattcttattcacttatttactttttttcacccaccagaatcctccaaactagctactttaatgccatagtcctatggtacgtaggattctttggtctaacgcaactcaacaaattcgtgttatgtgcccgtcaataataatggttaaaattttgaaaataatggaaggcgccatgttttggatgcattgtgtgttcacgaaaaaaattagaaccattagtgttagtaaaaaaaaaaagaccaatttgtgtgaatgaagtcagccaaagtgagaaaatttgcttaaactctaaaatatatgtgtaatattttttctgttttcagattataaaggggaaagcacccggaaaatagactataatatatctcattatattaagttattaacataccaaacttcatcggttaattattttgacgtacgtgaacgttatatagtgcttttggccacactggtgttcctgtagttcacgatatctgaagaattaatctgtaccaaaccaattgttcagtgcaccgaacgaatctattcactgagataacgcattatgcatgatgacctttatctaaaaggcaaattctacgtgtggccgcgtccatcaactgtgccttcagaactttatttataaaatatagttatagattattctatagaatcatgagttaacaaatactaaaaacatgtgaataaagttggtttagatccgaacaaaacataacatttctaagaattttggttgctgcgtttaaatttagtcataaagaccacttcacattattttacctctataaaatactttaaattaaaacttctttttgtcccttaacaaaaatttaaaaataaaataagaaactactttttgtcagcgtttgcgatggcaaacttatgatgtagtatatgttttgatattttacatgcaaatgttacattacttggtacttgatgtcgaacaaccaatcaaaataatttttataaactttattcatcggtacaaaacgataaactatttaataaataaaaaaatctttatagacgagagttctaaccaaccaagctaacatactcatacgtacataatattgtttttgtcaaacataatcgtgactaatttacagattgaaatgcatatactatgattaaaattcatgtatagaaactgaacggttgactagataaatatattacccatttttaggcggcacctgaaaatttttagtcgattatatgcccccgacaaatttgaaacgtttggtctctcataatataagaaaccgatcgattattttatttttctggttggtacggatttgttcttttcgcaatttctaacatggttatcacaattcttaatcatcttcgttgaatgcttcgtaggatgttatagaacattattaataccggtatatataaataatcttaagtatggttatttttaaatagaatgcatttttttaatatgatctaaaatagcgtacaatatctaaatatatttatgtaaaattgctataaaataatggtttataatgtcaaacgaagatgactaagaattagctaagaataaacatgcaaacgattatgataaattagtttatctgtataaaatcagcaagtattgtcgtttcgaaaacttatgggtcaggaggttctacaattacgaaatctcttttagtcttagtaatatttattggtaagtctcacatgcaaagctctactatataccaaacaaaacaagcaaaagttttaaaagaaacgtttagattcctctgtagtctgtgacccaaaattgtatatcgtttaatgcaataaacgtaattaagctctcgtatacttcaaatgcccaaatatcatttcaagtcagcctaaaactataccaaattttgaagttcgaccctaaacgtatatatttaaaaactcaatttcaatttttcacatcgtagaaagtttgtgtagctagagaaacatgttaatatatatagtttcgaattcatcggatatatatttaagtgtagttggtcctacatcccaatatcccatgatgtttttttggtagttcggtttctcaagttggttggtacttggttcggtttctcaacttggcccatgatatgaagcatataatatgcatacatacatctacattttcttttttaaagtgttacattcacaaatttacaaatcgaaacttgttataatatgcatacatatgcaaaacataatgtgttaccgacttcaatcgtgggtacgtatttttgagattgatgataacgtataatacatatctaaacagattataacagctgtttaggacattcagtttaatacccaaaaaaaaaaaaaagaaacaacgacaaaatagttgacgaatatacatttaaaaaaaaaaaattatagtaagatagtgtgtggctggccgtgaaccaacatggagaacaaatagctcgtagccaccaaagcactatctagcgcgtagcgaacacgtagtcaatggctaattgtaccaaagacgaacctagccacattatagtccacgttcaaacgaggcccaccagtttctataaaagtcaacttcaccccccaaaaaaaacgctcctaacttttgaccttttcgcttttcttgatttggagccagtggcattgtcgtaaaatcatttgatctaaccgctttgatgttcttgcttagtttccattacttctgtcattatcacctttatatttttttctcctaaaaaagccaaatattcgtaatcacgatctttatctcttataatttaatgtttattccaatttaaaacattaaatttataaaagctcagatctatatttctttttcccctcacttttgttaaataattttttttatctcttgtttatctttcttgaatttttttccagtttgaagcaaaatctattttctctgtaaattttgtacttttctcacaaaatactagggttttcgttttgtattttgatgagagagtgattcagtgaaccgggacatgattcaggtttactgattttactgttttaaaactttagaaaagaatagtgaacatgaacaatctggtgttctaaaatctaaaaaggggaggcttttaactaatatctctcgtgtactttttctctaattcttaaatcgttctctcttttctgtttctactttttaagatcccttttcgctttaataaattaaaataaatcacgtaaaaggtctaatttggaggaaaaaggctaaaaagcgagatcgaattcttcttcttctttttccaggtaagtgggtgtttcaccttccaactatcaatggctatgcataacaccaattaatttattttgaaacctctcatttatagaatacacgtgcatataatgtttaatcatcttcttcttttttggtgaaaatagtataatactagttgattcctttttcaattgtgtttttgtctatgtgtatagatatcagattaatcacccaattttataactggcaattatacaataatgaatagaactaggaaaatgttgaagaggtatcgtctggtgtaggagtttacgattacagcgtctcttcgatcggtagaatattaattaactcactatcaatcatgcatacttgtctacattacaaagtcaacacatgtggtgctcactttggctccagcaaaaactgattacaatatttgtgttttaaagtatataaaaattagtcagaaaagagaatcgtattattttttatagctttttgtgatcgaaattggcttatgtgacagaaaaacgccggttaattccttagaaaaacttaggttgaaaatgaattgcggctagtttttataataatcatgtcattgtccatcaacttgcacaagttaaagcttttgtctaaaaaatgggtgatttaaaatgttggtttaatgcattctaatgaacaagtcaatatgctggtattgacagaacatctacatagagtttggacaagagatcaagtcccaattagaaccaccaaaaaagaacatatgaattaggttttatataatagccttttaggtattctttccaaatttctgttcagttaggtttgttttctaagttttcttaagtccttttctaaagtttatgtccaacccaaaacgatgataaaaaaatccagaaatcaaatgttaattaataaggttctcttcgtctactcttagctaaaattaaattattttataaaaaaaaaaacgaaaggatatgattaacgttagttcttcctcgtttattgagggataactgttgcatttttaaaaaatctcactatgtgccacgtggctattctggtcaactatctctccttatagcaaaaaagtaaacgagatcattgaattgagattgttttcagtattgcacacaaagtttgccacagaaaccattgacttaatttgtttaaactttaatgtcgatcaacgccaattaaaaattgcatcttttctagttagacttttttcaatgttcttaatgtacttggtctcttagtaatccagattcatcaaattgtatatgaccaccactctcttatcattaaattaaaacaaaactatcctaaactttcgttataaataagcttcatcaatgttgctccaaaattcacacttaaaagtcatctttcaacccaattatctctatcctttctcctggttcgataccattactccatccacacaatttatataatctcaaaaacttgcaaagtaaagtactaatctaagtagtctcctgttctgtttgcagagttacatagctatgtcgtcaagagctcaccctgtggacggaagtccggcgacggacggtggacatgttccgatgaaaccttcacccactcggcataaagttggaatcccaccaaagcaaaacatgttcaaggatttcatgtacacattcaaagaaactttctttcatgatgatcctcttagggattttaaggatcagcctaagtctaagcagtttatgctcggtctccaatccgtcttcccggtcttcgattggggacgtaactacactttcaagaagttccgaggtgatctcatctccggtttaaccattgcaagtctctgcattcctcaggtgaaaaacctaaactcaagtacttgtatcacaagttatctgtacttgcttgtttcttatgtatattccttgatgatttcaggatattggatacgctaagttggcgaatcttgatcccaaatacggtttatgtaagtttgattttgacatgctcacacttgattgacctcatttgataaaacattggatactcaaaatatgtttcttgatgttacagattcgagttttgttcctccattggtgtatgcttgtatgggaagttctagggatatagcaataggacctgtcgctgtggtttcgctgttgctaggcacattgcttcgagctgagattgatccaaacacaagtccagatgaatatctccgccttgccttcactgctacgtttttcgccggtataaccgaagcagcccttggattcttcaggtaaaaaattgatctcttatctattaacaatttcttccttctttcatggttgaaaaggctctcaaaatgttcatcttcttccttactactctcagattaggattcttgatcgatttcctttcccacgcggctgtggttggcttcatgggcggcgcagccatcactatcgctcttcagcagcttaaaggcttcctcgggatcaagaaattcaccaagaaaactgatattatttctgttcttgaatccgttttcaaagcagctcatcacggcgtaagaaccctttacgctgatacaaacactttgtttcttgattcctccattgggtaaatctctttactaattcatataaatttggctatgcagtggaattggcagactatactcattggtgcatcattcttgaccttccttctcacgtctaagatcattgtaagacatatatctattaacaaaacatctaagtttattctttgtttagatctgtttctgacctctcttgacttgatgctgaaacaggggaagaagagcaagaaactattctgggtaccagctattgcgccattgatatcagttatcgtttccaccttctttgtctacataacccgagccgacaaacaaggagtccaaatcgtaagatctcaactccctctaactagtttcttgcgtttcaaacaatttgtcgttgtggtaatacctaatatgattcttttttcttttcttttttatgaataaaggtgaaacaccttgaccaaggaatcaacccttcctcgttccatctaatctacttcactggtgataaccttgctaagggcatccgcatcggtgtagtcgctggcatggtcgctttaacagtaagtacaaaccaatgactcatacttcaatctctcttaaacgaaagttcctcattgaaacccgaatatttcaatctgttttcgcaggaagctgtagcgattggaagaacctttgctgcaatgaaagactaccaaatcgacggtaacaaagagatggtagcattaggtatgatgaacgtagttggatcgatgtcttcttgctacgtagctaccggatctttctcaagatcagctgtcaatttcatggctggatgtcaaacagcggtttcaaacatcataatgtcaattgttgttctcttgacattgctcttccttactcctctcttcaagtacactccaaacgccatcctcgcagctatcatcatcaacgctgtgattcctttgatcgatatccaagctgctattttgatcttcaaggttgataagctcgatttcatcgcctgtattggagcattctttggcgtcatctttgtttctgttgagatcggacttcttattgccgtaagtctcaagaaaactaaaccctctatatatagctgcaataatgatgaatctaattcacttctaatcttaatttgctaatgtttgtatgtgtacaggtctcgatctcgtttgctaagatcctcttgcaagtaacaagacctagaactgcagttctcggaaatattccaagaacttcggtttacagaaatattcaacagtatcctgaagccactatggttccaggggttcttactattcgtgttgactccgccatttacttctccaactcaaattatgttagagaaaggtaaaaaccctatacaaaagtttaatattaaccaagatctgttacttggttgacaagaaatttaaatcgaaaaccctttttcatttacaggatccagagatggctacatgaggaagaagaaaaggtaaaagcagcaagcctacctaggattcagtttctcatcatcgaaatgtcacgtaagttaaacttcactcccaatttctatatatatattccttcttaatttttttctcataacacaaagattaacgaacaccattatttttcagctgttacggacatcgatacaagtggtattcacgcattagaagacttatacaagtctctccagaaaagagacattcaggtacatacatatatacacacatactgaattctttaaggattataatctaagcactcaaagtgaattagttgaagaagatttacctgactctgtgttttgtgatgataaacagttgattctggcgaatcctggaccgttggtgataggcaagctacacttgtcgcactttgccgacatgttaggacaagacaatatctatctaacggtggctgatgccgtcgaggcttgctgtccaaaactctccaacgaggtctgaaatttacaagaaagaagaagaagaagaaaatgaagataatgacgaagaagaagaaagatatgctcttttaaatgttgtaacagtagagttaagaaagtgattgtatttctttggaccctttctttatgattcttctatcacaccaaggggtcaagtgtaaagttgactactttttataaattaagatttttctatgaaatcaagtttaaaaccccaaaatgtatccaatgtagagatctatatatctctggaaatagattggttaaaccaaatgggaactcaataatgtgacaagttggagtttaaaatgcattgatatttttagtagattagatatgatctttatccatatgttgaaaaatgaaaagatgatcctatccttagagcactaaatcaatttgatatgaacgtggaccaaaaacaaagcaagattcatttatgagtggagtaacactgtagcttcctttttctcttaacttgtctactagcgcaatgcactgcgattttacaagtcctttttagttattgggctttatcggataaaagcccaaaccatgtttattcacaatgacccatttctttgtgaaaaactaaaaacgctgcgttttgattttatctcttcgtcggcgttatccctgagtttaggttgcagtgtcaatggtgagtctcctctgcttccgttcagtcggcgtttatcttctccgacaagctacgccgattataacccgaggcggaagaatctcgagacccatctctaaaaatctctgctttgttttattctcttcgtctcctaaaacctctcttcttaaacctcgcgctcagtcatcaggttataagagctatagaaacgattccttaggtttctaatatgacctcaaacctattcctaatgggtttttttctttctttcttttcattgtgattgttgcagagaacaattctcttgtgtttaaaggcgatgagcgtgtggtgggtcttgtgggcaaggtagtagacgatgcattcgataaagttgataggtttcagagctcaagtactattgtggcgatcgtaacgccgattggtggaccacctggtgcggtgggaattgtgcggttgtcaggtcctaaggctgtggaagttgctagaagagtctttcgttctgctaagaaaacgaagaagaaggagtctgattcggatacgtggcggcccaagagtcattttgtggagtatggagctgttgttgattcaaatggcaatgttgttgacgaggtagatttgaaaaagttcttaactttgacgctaatttacacttctctgtttcgatttcttcgtaatcgaattactggctttatgcttagatcatgatttttaacggggaaaggatttgaatttatttgacattgctactgttataaacgtttggttagatggattatggattttcaaagtgtctttgattattgaagtgtgactgcttgttaggttttagctgtgcctatgttggctcctcggtcatacactcgtgaagatgtagttgagctccaatgtcacgggagcgaagtttgtctgcggcgtgttttgaggacatgtgttgaagctggagcacgattagcagaaccaggtcagagactcaaattccttctgtagatttggttattgggtttctttgcctatgtatcaattaatctgtgagatttaactataagattagtaaaatcaggttctttgatcgatgtttgactttatctatgagttttagctatagattctgaatcatttttttttgctttattttggctggatttgtggtgcattcaggagagttcacacttcgtgcctttctaaatgggcgtttagacctttcgcaagctgaaaatgtcgaaaaacttatttcggccaagtcttctgctgccgcagatgctgctttggaagggattcaggtattcattttgcaattctttatgataaatcgtgtctaataatagcttgatgtggcttgtctgagatcattgttataacttctagtcgttctctaccttttgtttagggaggtttttcatctttggtcaaatccttaagagcacaatgcattgagctcctcactgaaattgaagctcgtttagactttgaggacgagatgccaccattggatatagagtcagttattaacaaaataaccagcatgtctcaagacgtagaaagtgcattagatacagcaaactatgacaagcttcttcaaagcggattgcaggtaaaatttaagaatagtattcattcttctcgttcatgtttaaaagaagggcatacgttttaatatgtcttccttattgaaatgttgcagatagctattgttggacgtcccaatgtcgggaaatcaagtcttctaaatgcctggagcaaagtatggaaacaaaatgatctttattttttgttttgtaaaaaactgaaagttgcaatctttaagtctatttattcaaatagagtcacatttccacgggtgctttaattttagcgtgcagagtgagagagccattgttacagaagttgctggaactactcgagacgttgtggaagctaatgttacagtccgcggcgtgcctatcacacttcttgacactgctggtatcagagaaaccaatgacattgtcgaaaaaataggtcagtattcgactacaaagcataatctttgccaaagcttagatcttgagagagattttgattatttttttgtttgcaggagttgaaagatcagaaacagctgctaaggttgctgatgtcataatcatggctgtgagtgctgtcgaaggctggactgaagaagacactgagcttctacgtaagatccaatcagacaaggtaggtggtctttgatagtcactttttctctatttttccctaatagtctcattttatgacctttttgggggtctcctttatttgaaacagcctatgattctggtgatgaacaaaattgactgtgctcctcctggtagctgtgatcaactagaagatcagaggaaaaaggaagaagttttccataagtctgtcttcacttctgctgtaactggtcaaggaattgaagagcttgaagatgcaatattggagattcttggtcttgatcgtgtccccactggaggacatcaatggactgtgaatcaggtctgtctcaattctacctgttattctgtttctgtccattaacttttgactgttgcatttatatcctctttgtgtgtttatcagagacaatgcgagcaattggtgcggacgaaagaagcgctagtgaggctgagagaagctatcgaagacgagattccgattgatttctggacgatcgagcttagagaagctgctttatctcttgctcaaatcagtggtcaagatgtctctgaagaggttttatcttccatttttgctaagttttgcattggtaaataaacagttgccacttaattaaaccccaaacaaatcataagtgtcttattaaccctttttcacatacattgaagtttgtttttgtgtgtttattgtatcatcgacgtacatacataaatgattagattcaacatacacatacctgattatatgtatcaatgcactttgtatatgacaagaaggtattttttggtccttgtaaatttataacaaaaaatgtcaaaaaggcaataatgaaagcgaataatgaaaaagaacctctcccgaccaaaaaataataatgaagtgtgtggaccagatgttgaagcccactagtgggaaaatgggcccgctagtgaaagagaaaagggcccactatcaatttccgaagttgatatttggaagttgggaccaattacgtttggttactgtagaataatatataaccttttttgttattgtgtccaaaacatgaacgaatcagagagtcgagaaaattaaataaattttaacgtctcttcacttttttgactcacctgtgtccacttgtcttctcaatcataccaaatcatctactacataccaaattccacgtcagcttcagttttcattgtcatatttgtcatttaattcaaaaagaaaattgacacaataatttaacggttccaaaagttatatgtgatgttttcaaattctagtcactaaatttatcctccaagcataatcaaatgaaatttgttaaaaaataaaaaaaagcataatcaaatgaatactaacgtatttgtgtgtttgtgtattgttgatgcttggatcgaataatttatataaaaaagaattcagggaaaaacgaaaagttttttattaaacgagtttagagttcagagttcggcgattgcaagaagataattacaaagacgaacagaatgttcgaacaagatgtaaaccgatacgtttgagctgaactaaagatgccgagcaaaagtgatcggtcaaaatgctcggttacgaagctttgtgaagaaggtgaagtaaaaatttcatgttgcattcaataatttaactcttacttcagttttcaattaattctgttcaaagttcccaccgtcacattgtaaggaaaagaagtaaaagaaacttatactagtatttatttaatgaggaaatgtcttggagacctacgatgttgagacttgagaccgaccattttggtataatgtgccactctgtaaaatctttaatttttctgtgttaaagaggtcacaatgcaccaatcagcataagcttttgttgtgattttcaatcagaaaaaaaaaatataaggaaccaagagcttttggcccaagtatcttccccatgacaaaaatatactcttaatttgttggcattaaattcataaggttaaaatgttgaaatttggtgagagatgatgtgaagaggagaaacgagagaagggctctataaaattgcaaaggccaaattgaagtacaaattgttgtcatttgtgaagaaggtggtccattcttttggtagcccagacgttaggaaccaaataacaacataattttctatttattttcatctatttttattttggaaaatgagttttcttgtaataataattattgttttatttttggactttactttcatgaaagaaaacgactgggtggagaaatggacaattaattcttgggggcaactatcgtatgatgtggaaagttaattattgttaatttagtgggtccattgggcctaacgggcccttcttgaatgattttatgagaattttctactgtaagatattgtaagacactgtaactttaatgaatgggggatatacgatgttttttttttattttaacaatccatcgttttatacacatgtttcgaagttcacaaacttcgcagacaaactaggtttgaaattttttaactaatattccaagtttttgtttgttttattaacctttccgtctataaaagaattaagagaaaagaaccataaaattaatgaatctacttagcaatattctaagatttgctgtctttaaataatgaaacaaagcttaagaaaataagattcttaatatttaaaaaaatactatgaaatttggacagaattgctgagttttcttatttatgtacaaacaccactaagtaatatgtatcattagcttatgtatttttaccaagtttgagaggaccatacaactaatattatcacgaattctattattgcatattgcaaagtacaaacagaattaatgcaaaaatgttctttttaaaataaatgtcaagaatcatgacgtggcataatcgtgacgataacataactttgatcagaaatactcaacggtctagattgagtcctgagtttatggttcttctttatcttccatgtctcttctccttcctcactcccctcttccctctctttatctctctcaagatttgctctgtccagagctccaaatttcaagaacataaacactacacacaaaacactgaatacgatgttgcttggaaagagacaacgaccaccgatcaacagaaccacaagtctatcggagataaagttcgatctaaaccttcccagcgagtcagagccatcaaatcaacagaagccaaccgttgcgagcccgtacggttccaacggtcaagctgtaacagcagccgttgatcaaaaccgtgggttcttagatcaacggctcttatccatggtcacaccgagaggtaacctgaggagacactcaggcgatttctccgacgctggacatttcttgagatcttgcgcactttgtgaacgccttcttgttcctggccgcgacatctatatgtataggtattatatataatcaagttttgatcatagtaaaaaaatttagaccttacgtaactttcatattttgatgatgaaccacttttttaatgatttaattgtttcttgaaagtcggatttggcttatttgaatgatttatgatagttacttaatttgtagtttgtagttggagtattattggatgattagtgatgaattttgtgtgattaaaatggcaggggagataaggctttttgtagctcagagtgcaggcaagagcaaatggcacaagatgagaggaaagagaaaggtaaatcggcggcaccggcgaaagaaccggcggtgacagctcccgcgagagcgaaacccggcaaagggagagctgcagccgccgtgtaatccccattttcatatacattttagctatatatatgtgtggtttgctatgtgtttgtatatgattatgatgggtaatacatatataaagcattaagcgttaattaaccgtgattaactgtgttaatcaccctcgtgttgtggtgaaattagatgattttcgagggttaaattttacaagttttgatctatttgaaataaaatcaaatgtattatatatatgtaagacttgtgtttgttaagtacttaatgagaaaaattaagattacgaatttgcattgaatttatgtgggcgaggtttcattttagccttttaggagattggagcaagatatttagaatcaacgataaaaacaaattaaattgtatcatatgttttataacgtcgtagattacgaagaaataaatagaagcgtaattggttaattgattataggaatagtttttcaaagtttaagtgattttttaaaaattcaaacattaaactttcgtttatgatagtggagaattcattccaatttttcaatctcaggtcaactaaagttgatgtataagtttgtactggctgtagcattaatgtacatttatacacaaatgtatatcaatatacatacggttttcgtatatacctataaatttttattatcatatgtaaatttaattaaaatagacatggtacggttaattagaatacgatgctgatcgagtcaggaatctaatgcctaatcagcatgggtcccagtatccaccaatcagaaaaaataatagattctttttcttttctttgttgtctttaaagttcgttacagtttcgacagattcctaatgacaattttgtgtgtttccttccttttgttaaaataaaatattttggaaatttttcgtttttatttctaacgagatgattaacgcaacatttttacattctgtagaatggtgtatctaaggaagtcttaagtttatattagcttaaataaaataaagtccacatgtgcataagttgtattttgtagaacaaattctctagtattttgttagattttaccatgacaaaattcttcatagtatcttctactaaagtgtgaaaacagaaaattctacgtattaacaatatatgtacagtatatgatattatatcacaaatagattgctttgtgaataagttttgtagtagcaagttgatattaaacattataaacgtagtaagtgagtaatagaatagtataccacttggccaaattggcatgtgtccgcatcaaatttggccaactatctgaattctaacgtctatttaatctctccaacctagcatccacgctccttaattattgttttacgaaacaaaagctgtataattatatgtttttttttaactaaaagctccaatatttaaagcaagtccaaaatataagattattggcatctttctcgatcaaataagatggtaagaaactgagaataatagcatgcttttatctagtatttatttgatagtttattgaagttaagaagaaaaaaaaccccaataatcagcacaaaagaccattattatatattccacgtatacatatttcaaattattcactttattaaagacagttctccaatacaagttttaacgtttaacatttgtgtttctaatctaagctttctgaaggagattaacaagctaagtatgcatgttttcacaaaatgatcatatggctaaagagaagtatgagctaacaactcgaaaaaagtgttggctgacatagtaacaaatagaatagagtttgagctatatatgtgttaatgtgtatggttttttgttttttaggaggggacaaggaataagaagttgtcccgttactctatggctctatttctaaatttcaaaaaataaatattgtaagtgtggggataagaatattaggagactaggagtacacgtgcaaatatgccatctattaatttatttttcctaatccagttgtacaataaatgttatgatcctttttacttcgagtctaatatagggtttaatgatataatacaaggttaagtacacttgagaaaggctaaaaaatgtactttattcaatcgcattagtgcgcttatgagttattagtacacatctacgaacggccgtatatttctttccgtttgtattaaggcaacacaataaaataacactcacgcatgttatttcgcctttatgtcaaactttgatttagttttatttttgatcttacattatttatttagagatttcagtagtgtcggcccgttttatgaattacggatcgaaatgttccatccaaattaagcaaagacaagtgggaacagctcatgcgagggtccgaatcatatagctttctaaattgttcatttaattcttagtttggactttaacaataatctcacgtatgtttattaagagtgtacataaaacaaaacatactcaattggtatctcaattatttttattcttgatctgatttagatattatactttcataactccccacttgcttaggtataaagtccctcacattttgttttttggtataatgcatgaataagaactccattttattttacaaccacacaaagcactatagttttaggattcgtattatagtttgtctttagataagataacagtgcgatttgataggagtggagtgggatgatttcaaatatgctttcactattgaaagatatgaaagtatttttaacattgtgatttatccattctatgagctctaggcctgggcattcggttaactcaggttaatcggttcggtttagtcggtttttcagttttttcggttctttaaaattctgccgaattgaaccgaataaaaattcggttcgggtcggttcggttataggctttaaaatcaactccgaattaaaccgatttttttcggttaattcaaaccgagtaagcccaaaaacaagatattgggtcaaaaaaattgtagaatgggccaagataaacaaaaaattacagttacaaattaataaatggggcaaaacgaaaataaactttagcccaaaataaataaacttaagcccattaacaattagggttcatggtatcttgccgccgctaccctcttctctccctccagcggatctgcgaaggagacggtgacgacaatggcgagggatgagaatatctccgtaacaaaatctgcccctaacgtgctaccatagtcaacaccacatgcaatggagagaattgacttaaaatagccatggatgaggatgattaggctactacgttttaattctctctagaataacactggcatggatcgatgtcgaggcggagtaagaagaagagaacaaaagaaaagggatggagaaggaagagttatgaaaataacgaaggtgcaagaagaaggttgaaagagaaaagaagaaacgagatggagaacaagaagctatgaagattagatctaggttttttttatctttttataggtagtatctattaaccgagaaaaccgatcggttatgtctgccgaaccgaaccaaaccgagaaccgaactccaattataattttgccgatcggtttagccttcccttcatagtcggtaatcggaaccgaaaaaatcggtttgttcggttcggtttgttcggtttaatccgaaatcccaggcctaatgagctctatcaaactcatatcttcctcaacttaagagtccgagtgattacgctaccgttttgtaagtgggccgttattgggctttgagatttaatgtgatttgagttcaactagatttaggatttgcgtttactcgatctctacgtttctctaataatatccacagccatgaacggagaaaagtcaccaccgattacgatgacgtttctaaatgataatggtttctcacattgttttttttttcgatttgtgttacatattttcattatcccaaaccaccttttgtattcgattgtatctttgttgcatgtttcaagagctcatctcgataatggtgtctttgttgcagattgtatcagtcaccaaacgacgcagcgcccaaagctgatagaagacaagtgattggtgtgaaagagtgtggtgaaacttatgttctggcagagtataagcctatatatgttcatcagctcgtccttgtccttgcaactgctatacagctgggattgtgtatgacattgaaggatgttgaatatgaaggaagattagatggaatctttgtgatgttttgaatcttgtttgtagcttcatataaaattatgattatgtaaagtcttatgtgtaatcaaatgtttaactttttcctttattcaacaaaggatttgtatcgataatattttactagttacagaagctgaagaagaaagtattgtaacaagttagggtgtctgaaaccataaaggttgtgtcttgctagttaatttatatataacaaaggctgaaacatgaactttttaagatgattccactctcgtttgcagcattaggagacatagttgataagaagcttgatgaggattatgtaaaggaagaagttgaaatgatgatacaagtatctctgctatccacacaagcagcaccgggagaacgaccaacgatgtcggaagttgaaatttttagaaactcctgcttgtgctacataaactggttttgcaacatcatctccataatatattctaacagtttgcttttgaggattgattcaggatcatcatctatatctgttgtcttcttagtttttactctgtctcgggttatccaaacagcagacttgtgtgagtacacaaacacagaacaacagaaccaaaatctctaaacaagaccggctctctaacaagagacataaccaccaagtagactcttgtctcccttgcactgcattaattagtaatcaccaaaagtctattcctgttttgcttcttctcttataatcatcaaacacacaaaaaccaaaaacgttgtagtagaccatcagctactggaatcagaagcaacgatagagtttgagggtaaccaaaatgtgtttgggagtaagcagagattaaatatctccatcatgtcactatgttgatgggaagaattcgattgattaaaaaaggaatctctgtacaaaagcccatccaaagaaaaggaaattaagatcaagacaaatatctgcttatgtcaaagtcattaaccgactccaacggctatattgaacaaacggttatcattattgatgaagacctaattaacactttgcttataaataaagactcatacacgcagcctcttctaattcttcgttgagagaaaaaatcaaaactctctgattcacattcacgcatcttcttcttcttctttaattttcttcttgagagaatctctttatacagagactctgtgtgaattccgatgatccaattagtagtcattgatcagaagtgaaaagcggatgatgatgatgatctcctctgcaacatgatgatccgtaagagttgatttcacttttttccgatgagtcgcagatggagcaacgacggatgttaacggcggctagaccacgtttgtcctcgacgatccgtacgattacgtctcacgtggcgttctcagcaagccgtctcttgaaaccttatgttgcatatcggcttggattggaggtatgagtttcgctagcacgattgctttgggagataggacgcgaatcagaggaaaacagagaacgaatccaccggtggagataaagaaatcgccagtgattagggtttcacaacctcgaggtataccacttggagagatactagtggtttgtgctgaatagaggaatagtactataaactttcaaaataacctaaaaaaaaattactcatatacaaacaaactacaaaagtttagggaaaatggatcattttgaatgcatactactagtaggttacagatactgaatcactgatccaacacataaggcttagttagagcagaaaatgtttttaccataataggcccaaatcttatatgtgcccgataagagatccaaagaaacccaattatcactgatccaacacattcaatattttactaatctcaaataattatcgttgttttggccttttcttacatttctactacattataatccctataaaaaagacatttaattttgatgctttttttcttgacatgtgatcaccgacagagagagtaactacaagtctaccattatccagctgcaatcacgcaaacgcaccgcctttttctctctttgccaactcgtttatttccaatcataaaatgccacgttaacacactcttgcagttaattgacggaaatacccctcttcacatactacaattacgatattaatgtgttaaaaattaacggtgtgggctaatctcacgcgctttcatcatcttcttcctagattcgctcctccactgtcttaaatttcactatcttcttcttcattttccttccttctcacttcaaatccataatcgctctacttctctctctctctctagattcgaaaaaatggcgaaactggtgatgttgttggttctctgtatcttaccggcgatagccatggcggcaaggaggggaaatattggaaagaatacaatggtggttcaaggtagcacctactgtgacatttgcaaattcggcttcgagactcctgaatcctcctacttcatccccggtatatctctatctctctaaatccttagtttctgcattctaagatctaagaagtttccaatgttaacgttctctttagtgtttgattctcgattctaatgaagtagtttgttagatctgagttccgaatctcgactttgaatggattagttagttagatctgagaattttacttatagtttgattctctatgctctcgtagtgttaactgcttttgctctagatctggctttaggattgataaatacagctttgttcattgattgtggtgagaattgttttgtccttcaagttcatagatcttgattgttgtggtggtaaatgattgttcaggtgcaacggtgaagctatcatgcaaagacaggaagacaatggaagaggtttacacagacaaagctgtatcagacaaagaaggaaagtataagttcattgtccacgacgatcacagagaccagatgtgcgatgttttgcttgtgaaaagctcggataaaacctgctctaaaatctccgttggacgtgagaagtctcgtgtgatcttgaaccattacagtggcattgcctcgcagatcagacatgctaacaacatgggatttgagaaagaagtgagtgatgtgttctgctctgctttgtttcagaagtatatggttgatgaagatgaggatgatattaaaaaccatctctaatctctctgtttaatcttatgatctgctgttttcttcattaatgagtttcgagttatggaagagatatatttgtatttgtttgattacttatttgttgtctttagagatgttgactctggtgatcggataactatctgtttgtgtaagcttcttatatattgatgtgtcatttccttgcttaggaagtgtcttttattaaagctagatgttgccagtattcaaacgttgttcaccaaagtctgtcaaagaaagacggagaagagaacttatttactttgggaacatttttctttcggctttcagcaaatgtttcgatgtgggacatagaaaactttcttattaacgtgcacattacaagtttagaatttaccgaattgggccgagtgaatacttagatccggcccatcaaaaagaaaacagatacatcaccaaactcaatatacctaataaaaagatccaatatatgttcacactaattttaatacatgagtatataacaatgtttgtattgtagtcgacaacaacgaccacaaaaatgtagcaatatccctctaatagtagtcgaggacgttaataaacaacataaattttgtcgactgcaaaaacaaacaacagaacatatgtttcatttgtgaatcgtcgtaaagatagaaaagggaattactaatatttttttagaaaatgaagaaaaacaaacaaaaatcacgagatttgaagaaacggccaaataggctgaaactgtaactggaaaatgccaaatgtcaaacacagttcgtcgccgtcaagaaagctccacaagaaaaaacaataaagcctaataaattaaataccactaagaagaaccaaatcgacaaaaatcataaaacgcctccttcaacaaccctatcgtcgtgttctcattttaactcttgtctcttttctacacgtaaaagccataaaggaaacatctttttcattctctagctcccaataaatcgtttataaagcctcaatttttttgggtcaaagatttagttaacatcgacgtgtactcgactctttctcttctccgacatcattgaattcgacgtttggtgggtttcttctccttccttggtttcgtcgccatagtcttttctaattagaacaggtatgtttcttctgcattcgatttgattcgcgtttgggataccaaagttgggatctttagtcattgagtttacgattcttgattatagaattaaacccttttgattgttattgttacgcataggaatggctacttctacgactatgtctcatcaagcgattgggtctgttgtctctcaaagaccattcaaagcttctcagtttctaaaggagcctttgaataatgtaccaatgaaattcagacaaaaaagattcaagattgaagcaactgcttctcagatatctgtcgttgacaacactttcttgtctccgtctccttccaagaacaaaccacatgaatctaagaagaaatcaagtatgttgcttttgtccttgtgtcatgagtgtatatatatcaagagaagagaaacattgaatcaagtttttatgtttttgtttagatgaagcagctttgatattgattaggcatggagaatcgttatggaatgagaagaatttgttcacgggttgtgttgatgtgccattgactcagaaaggtgttggagaagctattgaagctgggaagaagattagtaacattcctgtagatttgattttcacttcttctttaatccgtgctcagatgactgcaatgcttgccatgactcagcatcgtcgcaagaaggttacaaaatgatctaaatggtttatagctctttgtcatgaaactgctctattttgacttgtgtaaatttatcttaggttccaatcatcttgcacaacgagagtgtaaaggcgaaaacttggagtcatgttttcagcgaagaaactagaaaacaatctatcccggttatagcggcttggcaactgaatgagagaatgtaaaccaaatgtcaattttcttgtgtttgtttcttatgtacacaaactctttaaaaatgttgatttgaagtttccatcttttgagttaggtatggagagttgcagggtttgaacaagaaagaaacagcggaaagatacgggacacaacaagttcacgaatggcgcaggagttacgaaattcctcctccgaaaggcgagagcttggagatgtgtgctgagagagcagtggcttattttgaagacaatgtatgaatgagagattcttttgttttttcccttattaatgttgtcgttatactgatgtctaatcttttatgcagatcaaaccagagcttgcatctggaaacaatgtaatgattgctgctcacgggaactcattgagatctatcattatgtatcttgacgatttaacttctcaggaggtaacaaaaccatctggttccagtccaatacctttaatcattttggtttgcggatttgctgaaagttaaatttgttttggttttctcaggttacaactctagacctgtccacaggtgtaccattgctctacatcttcaaagaaggcaagttcatgaaacgaggaagccccgtcggttctactgaagctggtgtctatgcttatacaaaggtaaaccaaactaaaccaactgtttcttcatcttctttatctccataattatgagtttgctgacataatgcttcttggtttcagagattggcacaatacagagagaagcttgatgcggcggcgaccatttaactaatgtcttccagaaataaaccagaaaaatcatttgtttttgtgtttctctggcttagctcttatgtagtgacaaaacaatcaagaacagtttaaatatgtagtagatacacaaatcacattcatttcatgttatttcaaatatatatgaaaaagccaattcaaaaggagaatgtcttttttcttgtttatgtttttcagattcagacattaacaataagagggagctctgaatctccaacggttaagaaatactttccttcttcaagaaccattactccaaattcattagctctgctcaaatgctcacaaagaccaatctcaaactccatctctgctttctctccattgcttaacacaatgctcttaaacccaacaagctgtttctctgctcgtttaccgtcttctcctcctcgctcgtgcctcgcaaacatcagcaccggatgtttccctgccatctccccttgattttccacctctacagtgaccttagtcttggctacatcgcaaccttctttccccatttccgaaaccagagtgtatcgaacagagtccgagttggtttgagctttagattggttcaagtagagattggtttcagccagagtcttgaaccggtaagagtaagctgagtagctaagaccatgaccaaactcatacactttaggtcctttatagaatttgtaagtccttccaggatatccagttgcagaccgcattctcatgtctgtcatctgtatattcacaaagctctgaggataccatgtcactggtaatctccctcctacacaccacacgattataagaaaacgaaacttagaaaacaaatcaaagcttttgtctctaattcttgaagaagaagaagaaggagaatgactcaccgggattgtgatctccgaatatgatttcagaaatagcaatccctccagcttctccaggataaccagcccatataatgcttcctatcttattgttattcgcagcaaatgaaatatcgacaggaccgccacatatcagaacaaggaccaccggtttctttgcagcatttgcaacgcttgttatgagttcttgttgcttcccgggaagactaaggtccacacggtcaaaatcttctttctcttgagtctggtctagtcccataatcaaaaccacatgatcagcattttttgcaattgcaaccgcttgatcaatcgcagcgttagagcaagccacggaatcacatccttggtggtaaacagcgtttttgacataactacgtaaggcatcaagaggagtcacagtcttacaaggcggaccagcgtagtttccaagaagcgttttaacgacgtgagcgtttggaccgatcacagctaaagacgaaacgctgcgtttggagaaaggaaggagtttaagattgtttttcaagagaactataccattacgagcagcatcaagtgctaaagcttgatgagccggtgaacaaacttcgttaggactaatgtttccgtaaggtaatttggttggatcgccgttaaagagaccgagacgaatcctaacagagaaaagattgagtagagctctgtcaatgtctgtttcagacactttcttctgttgaagagctgatttggtgtgtttttgtaagtatgatccacagtttacgtccatgccagctttgaggacatcagcaacagcgtcttcagggcttttagcgtagccttgagcatcgtagatgattgagactgcgtcacaatctgaagtaatgtatctgaaaaaaaaaacagagtttatcaatataagtggcgttaaagaggcaaagagacgagaagaagagaggaaccaacccgcggaaagcccattgaccacgagcggttcgagtcaaaagattcgggtcagcgcaagaaggaatgccgttgactcggttataagcacacatgatgccactggctcgaccttcttctatgcatttcttgaacggtggttggtacgtctccgccaagtcagccaaactcaccttttattttatttattggacgacaaacataattaatagataatgatggtctacgtaaatattaatattcattagaagacatcaagattagcacatttattcatgataagacgtaaagagtgcaatcaaggaacaatttatagaatataaaaacagcattatgtaaaagtttctactttgaggtcctaaagacaacactttagcagaaaaagcaaacacaaaaatggaaaaagatgagtaataaagcattgcgaatagtgaattaagagaagtaattaattacctgagcattgaagacgtagcgagtaatacccttccaacgatcaagatcgtacgctgtaaaatgcttacaacaagcggaggcttggagatgattggagagtgttttccgaccgtcaaaagagtcaccttgtagtcctctaacgtaagccaccgcgtaagttccggtcatcatcggatcctcgccgggagtttcttggcctcttccccaccgtggatctctaaatatgttaatgtttggtgcccaaaatgtcattccattcgcttgccctgcgttgtacactcctcttgcttcctttcctataacctgaaaatctcaatgcaaaaacattcttatttaatattccttatataaaaaaagagtatatcctacctattttactaccaaaacaagtttagttccaaaattaacacaattaatccaaaaaataccataaactaggtttaacagtttagcaaatattagataaattttaacaacttttaataacactaccatgacatttgttaaaaaaaagcatcgaaatttgaacaatacttgtgacagtttaagacagattattaaataaattaatcaaacacgagaaaaaacagagtgagagtgaaagaaagaaacgaacttgagcaatgcggaaccattcataggagtcgaatgaagcagcggtcaagatgacttgaggaaagctggtagcagctttaaccgttccgttaaaccggattcctggaccggcgtaggctacgccgtgtaaagcttctgaccaccattcgtacgccggaactccaagacgcggtatccctggagctgtattcaccagctgcgagatcttctcgtctatggttagcctcgagacgagatcacgcgctcgcttgccaattgggaggtcagtgcggcagaactggtagagtttcgtggttggatttgaagggtcacaggagtgcggcggaggagctgattcaacgccgtggacgatgaagagaaggagaagaagaagcagttgtttagccatggcttcgaaatgcggaaaagagatgagaaagtgatgagtgtaagagagtgacagagtctctgttcttcttattcgttccccaattatgtctgtaataaattgacttaaataaccttcttgattcaacagggtaacctaaaaatttattatattgttgtttttcaataactctttttttttgcaattaatggacatcttaaattttttattcaatagttgaataagtataatgaagttgttaaattttggtgttgtgaagtttttgtgtctttttctgatttgctattttcattattattttcagatttttatctaatcctatatccttgagatcaattagtttatagaaaatgttttaaaaacagttatatcaaaactcatcattttttaactatataaatagagatttggttcctttaatttggacacatagaaaatcgtattagattgcatattatctcaaataaaataaacaaaaagtatttgatttttatctatttctgtttaatttaatttgctaataaactatttaattcttaatcatttaatttaataaaaatcaggatagactgttgaattttattaaataaaataattgtagaatagaaaaaaatagtatatatatatatatgtttaattattagatggaaaagataacaaaaataatgtgaaaaagaaggaaaaaaaatgttgaattatattataccattataaatggtcttacgggccaaagcccaataatattttttccaaatagcttttaaggtctttgcgttaagtcatttagcatatatttttttcccagtgtacagcccaataagtctttcaaaacgttttggtatcaaaacatgtaatagcgtttttatatatcaagaattgtttaagaaatgtactgaaccgtccaaccaaccatataagtgataatggatagcaatattattataaccttatcaggtcaggccatatgtcacaatcaacctaattgtgatctataaaagttcacctggtcacgtatctaggtttgactggataaaaattgtcggtttcaaacaattaatacaacaatattactagtagataatttgtttctgtctcagctaaatgtttggtggaaggagctttgtagagaaattcatttgaagtaaaaaaatctaacacaaattcaacatgttcagaataataattcacagctgggtaaattttaatttacaattattgagtttttttttttttttgtttatgtcaaactcaaaactagtgccacgtggaggaagctaagcctataaacgattatgaccgacagttgtcactctagaagtagcggtccttgtgacggcataagctggtcataaccgcttagtggtgatgatttgacgaaattgcccattaagcgactgtgagatgtcggtagactacgatggccacgttccacagagagtgacactaacaaccaaaacctattttattactattttttcttttgtcattagtattttattactaattgtttgaatatttcctcgtggtctattattattaaacactctagtcctcttattgttcattaaaattgtctgacgcttgtctcttcctttcgttttctactagaaaattcagctattttcttaatgttttatatctcgtaaactcttaagttgtaacagtgtttcaatataatttgaacacatattgaagtttagtccaaaattcttcttctccagaatatatccaaatcgagtcacaatggaaaacaaattctcctttgtaggtaaatagaaacaaacaataattgtggcattaaagtgttttaaaacgagatcccaataatttacatcagtaagatttcaaaagtgtgtaattagaataaacaataaacctccacaatttggaagatattttgtttccatatttgtcgcgtataatttattatattgtcaattctcgagaatttttaacgttttgttttgaccaggtaacgactgttccggtaaatatgtaggtccaaaaacttcccgcggacttaactcgttttgaaatccgctgtttggttttctttttttattaccggctctaaccggtcctacccaaaaccttgtcatgtcctctcattcctccaccgtttataagtaggcccttaactccaattcccaccgtttcttcgctaaccacacaaagcttgttcttctccttccttctccaatttcgtaagctcaaagatttcgatttcgattttgattattgccaaaggtacaaacttttgaacacaggtttgtttattttgtttcactctgttcgattttatggggttttatttatattttgttcttgatcgattttaccaggtttaaagatggatattttcgacaactctgatcttgaataccttgttgatgaatttcacgctgatttcgatgatgatgagccctttggagaggttgatgtcaccagtgagtctgattccgatttcatggactccgattttgatttcgagctggtatgatactttactctgcttcaagtttaggaaaggcttgaaatttaatggatgtgatgaaattaatagcaaacttgttatgttgttgttttagagtgagagtaagacgaacaatgaaacatcagcgttagaagctaggaatggaaaagatattcaagggattccatgggagagcttgaattacacgagggatagataccgtgagaatagattgctgcactataaaaactttgagagtctgtttcgatccagagaagagcttgataaggttcgtcttagccaatcaaagtttttatagcttatgatgatggatgatttgaaatcttgagttttggtgtgcatctttcttatgatttcttgtattttttgttgtcaggaatgcttgcaagtagagaaaggaaagaacttttatgactttcagttcaatacaaggcttgtcaagtccacaatagcgcattttcaggtagagaacttgaccaactatgtttgctatgtttggaatactctgtttactgatgcttggagtcatctaggttttcactctttatcatatataaatcctctgtgttgctcagctcttgtctttagcagtcgtgtctgcaactgcaaacagtagttccacagtggcttcttatcacgcatgagttctctagttacatggaaatattttatgagcttagagattgtagttccatgctgatttcagtgtcacaattctttcacaccgagtctgaaaaccccaacttttaagtgagatctgccaaacttattttgaagatgaaaaatgtatctgttgtcagtgtttattctttttgttaattatgtttgatcttagaatttgcgataactcttcctgttttcttatgttgatcattgttcccaccttcagcgctgtagctgggggtgttgattcacacaaagtccttttcttttgcagatagtcttcaagggtgcttaatttaacctgctcgtttctaacttctcgaaatataataacttaggttcgttttttactcagggacaatattaaggttctaactgattcaaaaagagtgtcatgatatgtttctaggatgatcgaggcagagttgatatatctaactggtacaggcaactttttaacatcttcatatactttcatcacctcaaaaattagagtcagagagtgtattaagattcccttgcacattagacgtcgctcaatgtccattattagaccacgggaactgtattgaagatttaacactacctctgctgcattttgagaaacagttactgtatgacttaacctttcttaaacaggttggaagagcagctggcgccttaaggaaacctttgttaatatggtatgataggaaatgtttgctaatctgcaaggactctctaactttgtcatccttatttcttacaggaaatctttttgttcaagcttatatgagtgcttcaatatcatctgcattttttcgtgatactatgctcttgtgcttcttattatttcttttggttttggtcttctcttctttcttttttttctggcacagttgcttcataaacgattaatgctgaagtttttaaagtcaacatttgattactgaaacggttgctttgtttccttcttggcttgtgttttgtgtgagaacttgcatgttctctgcttttttgtgtaagatgaccagttgtatcctatgcaacaatcctaatcattattgtctcattttacagctgaggaacttggtatgggcaacatcaaagcacgatgtgtatttcatgaacaactactctctcatgcactggtcatctttgttgcaaaggggcaaagaagtacttaatgtggcaaagcccattgttccttcaatggtaagcaacctaactcgttccatcacttgttcttgaaacctcggaattcaactatatattaactttggtaatttaatcttcagaagcagcatggatcgttgtcacagtctgtatcaagagtccagataagcaccatggcagttaaagacgatttgaagttgcgggagggttccaaggagagcttatctgtaaggtatattaatatattctctgttctgcagtgatcttattgttaatttgtttgctcattttgcgtggtcactctgattccagaaaatcaacgaacctgaggttgctttctgcactaaactaacatcagctgataacgacatcaccaattcggttgacatctacaacgcacctaggtgattactaaacagaacatacattggttttcaaaaaaccaaaaaaaacaactcttctaattcttgcttccttaatccatgtagtggctcgttaagggttatgaccgcgaacaatgactgtactgtccggctatttgatgccacaaactttgccttgctcaacagatttgcctttcactggtctgtaaatgtaagtgcatctctttctcataagactcaactgttttcatctgctattgattcaaagtgttcataactaatgtttttggtgtgtctttgtagaacatctccaccagtccagatggtaagctagtggctgttctaggagacagtcctgagtgcttactagcagataccggatctggaaaagtgatccacggactcgaaggccatctcgactactcgttttcatcagcatggcacccaaacggtcaaatcttagccacgggtaaccaagacacaacctgtagactatgggacgtaaggaacctgtctcaatcactcaaagtcttgaaaggaaacatgggagctatcagagccttgaggttcacgtctgatggacggttcttagccatggctgagccagcggactttgtacacttgtttgacacggaagctggttacagtcagtgtcaagagattgatctgtttggagaaatagcgggaatctcgtttagccccgacacggaggcactgttcgtgggagtagctgatcgtacgtacggcagcttgttggagtttaacaggaagcgaaaccactcgtatgttgattccatattctgatctgactccaatcgttagaagcaaattaaggagctatatgtatgtgtgagattatggttgtagtggctgttggagggattaaaagtcgttgtttttgtgactttccctttgtcatgtttatgtggttttaggaattccatgtttggtcaactgtagaacatacgtacttatatgagtgctgttaaactttgaagacacaacttgtaggctatggggacgtgaggaacctgttaaaatttgaagcccaactcgatgttcagaagcagcaccaggcctttatttataataaaaatttgtggcttgaagaatgtgattggggtcgatgtgggacaaaaacaacaactagtttcacgggctttaaatagttgaagcccaattaggtgattaaatgtgctgtgaaacagtactgatggttgggagaagttgagattgaaaggattttagagcagcatctaatactaaaagtagtagacataaagatggttaaggagattttgatagtcgagatttctatctttttctcaagacgaataaagcaattaaggaagtgtcatgtactcatgtgtgagtgagccacttaatgtaatgttaaagctttacgaaacattcctcaattacacctaaccttcttcttataacagaaaataaagagtcctttgattctatttcttcaataaccttttcttttttctttaaaacgtgtcacatattataattgcattctaatttctaagagaacaacaactctttgatatctttcatcgagattcaacaataatggtattacaattcaaattgggaactatgtgcaactgaaaaggcaaatgtaatagcgtccaaaattctgtacttattttttgatctcctccattgatgaaaaaagaaacttgtacttaatagcttagtatataaaaatggagaaatggaccatatgtcacgttaatcacgatatcacgcgaaaacgataaaaccaaagaagaagaagaaaaaggtattatgaacaaaatgtgacggtgacaattcacctaaacttcacatgccattcatcttcctcacaaaacgccatccaactgctctgaaaacgacaccaccctcagttttttgttttcgcaaaactctctaattcagtccaaatagtttctattttgtatattaacaatttcttatatcctcaactatatattatcaaagtataatcacaataatttgttgttaatgtgaatggaacaaaaatcttcaattcataaaaaaggagtttgatttgtattttgttttatgtgacgaaaattcgagatatttttcaaagagacataagtggagtgaggttggttaaagttcacggtggccacacagctagttagatgacagttcaatatgggccattgattatgaacacgtggcgttaaagtaaacggtcgttggattttttgaaaagttagaaaacggcagcgtttctaaggggaaaccgcgtgaaggggctaaaaataaactttttaaaattggaaagaacttttcaaagtaacgaaacgatgaggacagggacacgcgcaatccatgccacaatgatcttattggatatcatttctttatcttttttgttttatattataggattttcaatagtataaaacaagaatactaatagtcatatactatagattgtagaaaactaaaaatagtctacttattacaatttccagaactagccaaatatgtgaaactttagtcttaaccaagtttgatgatgtggtcaattagttaaaggtataaggtatattctcaaatattccaggtagccagattttagtaatcttacgacgtggctcgtttcctgataatatgcatgcatacaccatatgatacatgcaaaaagagaagcaaaaatacaaaattaacaaatacagataatttaaggcttctgagtagcccagttaaatgtattttgcatagaagacaatgaaaataatcaatttaaataaagaaaatgtcagagttctggaaagatatgcagatgtacaaatgttgccgtcaaaaggatggaaatatttaggagcaaaaaaaggttggaaatatttattttaagatagatgttaaaaaagagatacgaagctgtcaaataattaaaaaaaaaagctaaattagagggtgcattagatgcagttgacatttcgttttcctcatgacatgctccgctaattattcctcataattctcgtattattccatgtgaaatttggtgtataaccaaaggaaaatacttgtgtacgatatcaagattttccaatctttatattatatacagtttactttgattttccaaataattacacattttaatcgtttgaaaatgatcaataatttagtttgccgtagccaacatatagattcttagattaatcattctagagtatataattataaaaataaaataaataaatagaaaactcttttggatttttgacaatacatgagtaaactattggtcgataagtcgattagactattttcttaagcaaccttaaaatgttgcttccatttaatttcatacgggttgcttcagatatttatgctccttattaattatgtaacgataacaaatcttgaccgttggctgagtttattttttatatcgcgcaggtccgccgctattttagtccaatgtgaaactcgaagtttcttccgccgtcgctgcaaacggcttacgtgttcaacaggcacgtgcttcccacatgcatcctttacttcgccttgcgtcttccatgctcattcatcttctgacttttgactatatacaaacaaaaagtgctttttatatttcaatcgattttacaaactctagacgcttctaattttttacatacaagtggtacttcatctagcttaccaagttggtattaggttttctaaagtttgtgtttctaagcatgtgtttggtaatgatgcaactaaatacaaaactagctagacgttatacctatatttttttactctacgagttgtcgtcgatttttctaataacatttttaatggagctgaaaaggttatattaataagtaagacaatttatatttcgttaattttgcttctcgttcttatgagttgtcttcgtgacgcaattattcgtaagacatgataatcgataatctttgtcaaagaagtgcaatcatattattacctacagaaaatcgaatttaaactccaaaatcttctacataaaatattcagaaatctaaccattagatgtagtggcatttgctttgtttggttgggcatttgacaatagcgataaaatcgagtgttgtggcaactgcggctaaagatattaaatacacagtcagataagatgtcgaaaggtttggactttagttaaaatattagggtttttatattctatagaggagtgatatataatatggtaatgataatggtggagttctcggccaatccctccctaaacctctagagagttctattaatttttgtaactatttatgtcgactaaagtctaaactacccattataattatcatgattaatacttgcgcgactaaacaactctttaatattaaatattatattatcttaaatcatgatgtaaatctacatcactatcggcgtcttaagatatttttcttaatttcaatattatttcttatataacgtcgatagttgaattttgaaccacattagtttggctaattttattgaaacttcttagtgattacatgttaatgatagatattatatatttttaattacatacgataaagtgaaattcgtattttaacagtttcacgttatttatgaaattatgggtgtgtgatctatatagcttgattagtttctcacatgttttttttggaaccaaaattaaattagttcccagataatatctctttttatctccactaagaacgaaataaatagaaaatgatgaggaagtaggtgacccattaataagaatatcacaactgttttggaagcatccctgtaccactcactatcttattcttatctcttatctttcgttattactaacaaaattattattttataaaagcacacactactatatttatactccccaaaagtaataagaaatccgatgaaatacgttgaaaaaaattcagatatgatcaaccggtgtatgaaaaatgtaagatagtaaaagtcatatcatgtgaataataagaagtacaatgttgaaggctatggtaaaatagtacaaaacaagtgaaggatatggtgtgaagataggttttaacgattgggagaaattacttaacttatttcgtagaaaaatgatttgtcaaaagaatgtgttattcttaaagagttttggttaaactttcaaaaaaaagaatgatgggaatgggatcactcatagtttctactaatggtaacaattcttgaacaaaaaagaagaatttattacaattttggatgcttttaagtttttgaacagaaaatataggaaaaataaatgaaactagagcctaaaagtcagcaagtttatgtagtcatgattataaccattaaccaataagagtatgagaccaataaaagagagatgattaaaacacagaacctagctaagcaataacaaacaaacaaataagcaaaatggtctgtgaactgtgaagtgtgaacacgaaccggatcggtcaacaaaatcaggtatgactatttactccacaaagcacaaataatatgaagacacgtgtttttgaattatgtattcctatttgtataatacacgcgtcattcactcattagctgcatgtcatttttctcatccgctcgcaggtaggaaaaatacagtgtacctcgcgccgattatatgaatttatcagcctcatcataattcataaataataaatagacgaaatgaaacaattctggaatagaaatatgctgatctaaacaaaatggatgattataaaaatatataaacaattttaagaaaatttggtggatacttttcttatttttgaaaaatttcatgaaaagagagaatgtaaaaatagacttgttatcttacaattgttttctacattgcgctacataaaaaattaagagtacataatatatttcgtttgaacatttattccttttataaaattatgttaatgtagtcatgtttctaaattaaattaacaaaatgttaatgtagattaaatatcttacttttttttgaaatttcaattagtttccaaaatataaatatttctatatatagtataaaataattcataatcaaatcctaattgaaaagaagtaaagattattttaacaaaaaaggggtttgacattagagggtaaagacgataactttaacgacaagttttaggtggattaaaaaaagaaaagttaggttgtatcattaaatattccatatgcatcattttaagaggtgtttaaaattttaaacacaaatttaaagaaaaacacgatatttttatttaatttactattttatataaaacgccagaaaataaaataaatacaagtattcaactaataaaaacatattataaaatatgattggtcagaaaaaagtaaagtgaaagatcgctaaaacatcacttaaagtaattctgaggaagtattagtatttatggtaatcatttatcattacatattttttttactaacacagtctaatattattttttctaacactactacagttttatttactgtcaaaaagtttttaccatcttgtgtgtcatcaaacaaatctactcgcttaggtattttgaaatataaaattgcctaagaaacggaaaatatcgttggaaaaaacccggaaaatatgaaaatagtgtgaggagactacacccactatataaacaagagccaagcaggtgaggttagttcatcggtgaggttgagagtaattcactacacacacacaaaaaataaattgagtgcctcccccaaaaacaaaattggtagataacgagcaattgttttttttcagatttgatcctgaatttttacatttttttttttgcaatctccccctaatctgttgtttctcgcttcttcttctgttaatcatctgtctttcaaaaagaaagaaaaaagaaaaattcgatttctgggtttgtttttgtcatacagaaaaaaatcaagcttatgaatttgtgtttaattttttgttttaatttgaaaggcaggttttttcagaacgagatcgttttttcaaatttcttctgattttacctctttttttcttcttagattttagtgaatcgagggtgaaatttttgattccctcttttcggatctacacagaggttgcttatttcaaaccttttagatccatttttttttaattttctcggaaaaatccctgtttctttacttttttataagtctcaggttcaattttttcggattcaaatttttattttaaatggcagctgctatgaatttgtacacttgtagcagatcgtttcaagactctggtggtgaactcatggacgcgcttgtaccttttatcaaaagcgtttccgattctccttcttcttcttctgcagcgtctgcgtctgcgtttcttcacccctctgcgttttctctccctcctctccccggttattacccggattcaacgttcttgacccaaccgttttcatacgggtcggatcttcaacaaaccgggtcattaatcggactcaacaacctctcttcttctcagatccaccagatccagtctcagatccatcatcctcttcctccgacgcatcacaacaacaacaactctttctcgaatcttctcagcccaaagccgttactgatgaagcaatctggagtcgctggatcttgtttcgcttacggttcaggtgttccttcgaagccgacgaagctttacagaggtgtgaggcaacgtcactggggaaaatgggtggctgagatccgtttgccgagaaatcggactcgtctctggcttgggacttttgacacggcggaggaagctgcgttggcctatgataaggcggcgtacaagctgcgcggcgatttcgcccggcttaacttccctaacctacgtcataacggatctcacatcggaggcgatttcggtgaatataaacctcttcactcctcagtcgacgctaagcttgaagctatttgtaaaagcatggcggagactcagaaacaggacaaatcgacgaaatcatcgaagaaacgtgagaagaaggtttcgtcgccagatctatcggagaaagtgaaggcggaggagaattcggtttcgatcggtggatctccaccggtgacggagtttgaagagtccaccgctggatcttcgccgttgtcggacttgacgttcgctgacccggaggagccgccgcagtggaacgagacgttctcgttggagaagtatccgtcgtacgagatcgattgggattcgattctagcttaggggcaaaataggaaattcagccgcttgcaatggagtttttgtgaaattgcatgactggcccaagagtaattaattaaatatggattagtgttaaatttcgtatgttaatatttgtattatggtttgtattagtctctctgtgtcggtccagcttgcggttttttgtcaggctcgaccatgccacagttttcattttatgtaatctttttttcttttgtcttatgtaatttgtagcttcagtttcttcatctataatgcaattttattatgattatgtaattgacaaggccataacattttgattacgataaaccatgatcatgtttaagaagatgacttaacaaatgtaatctaagaacttgaagattggatttgtagtttggtgaatgaagaatagttaaatgtatcaccaagtagttttttttttttttttttttgacatatgaaaccaattaacaagtcttcacctacctaaattggtattatgatattaacaccttctattacaattctaatgaagcacgtctctttgagagtatcgtcgtcatatgttttaacgttttcgtaatctgtcaatccgtctaaagttttgattcgtcgagataaaatcggaaagtcgatttgatattgattgacaatttatattacctctaaataaatcatgttgtagtcggattgatagaagaatcaagtagtatgtatagtaacgttctagtcataatttacatgtggcagaacgggtttgttccactaaaaaattgttatgttttcaaaatgtttatatatgtggaattttcatctatgaatgtttgtaacgcatttacatgatattactcatttgctaacacgtcaacagtcaacttgttcttcatgttaacatttgttggatctttctcgcacgttctcaactttgttgtataagaaatcattatcaaacatatatatatttcttgtccgttttattatcactaatggtgaaaacttggcgtgttggtggtggatgtggccggccttgccacaacttttcgtgaagcaacttccatcatttatcactttatattcaaacaaatattgaattttgcaataattcgatgtcactgtagtgaagtagaaaaagacaacattgatcgaatcttcttcacacatttttagaaaagtagatatggattttcgccgatacacaaaagatgtgacttaaagaagtaaaagggaaataaaatttttattgtttgttcatgttattttcctaaagatatatttctatctcttataaaattttaaaataatccacaaataccaatatttttatgtttattaaaagtagcaaatagaggagaattccaaattacgcaaaggaagcataaagatggaaagtttgaaaggcacacaacaccaaaggagcccactaaagattatgttcacactccatttctcgtctctttcacatgcatttttcaaccattttttgtataaaagttgttgtattttatgacattgcattgaattc

SEQ ID NO: 141 - DNA, 78378 bp, Arabidopsis thaliana
aagcttgcgttttttaaatggaggagagaagaagaagtaacaatgacgtcaacgatggaagggcaaaagcgtcattgtaaattaattaaagtcggttacaattattattttcccatttttcttaagtagtttattaagattaacaactacttaatttccattttttcgtaagtagccgttagtgatttccattttttttatccacgctcctgttatttacatatacggagacgagagtttctcccccatattaagattgtttgcaaactacaatctcttacccttgttgtttttcgtcttcattctttcatcacacgtatgattccgatcgactaaaggatcaccaatctcaacctgagagagccatctatctacgatcaggttacttagttatagtcgttctctctctttcaattgtatctatttctgtttcattctgtcatcgatgatttgtaattccatacattagggtcttctagggttcatcgattctcttttcattgttgtgtgactctgtttttctgatttttgcgtgtcacagacttgtatggagtgattcttctcgggtttaagcaagtaaggacgaatggtaatagatttttgttactttaaattgattttaaaattggattttgatttgctgggacttagtatcttctttgttcttcatgtatagagttcttttgactgtttgacaacacgtgaatgctccgatctcgatcagaaattggtatagctttcttctgtctgtttgataacacgtgaatgctccgatctaatgtttcgttcactggtatgtcttttcgacgaatgttattgttcatcaatttggaatttaggaatttagcctcttgtttggaatttaggatttggaattttagaattttggaattttggaatttagggctttagcctcttctctactaatagggatttggaatttgggaatttagggatttaggtgaatgttatttttgttcatcaatttggaatttagggattcagcctcttgattttttatttagttttacctcaaaatttttatttttctctttttacgatagcaaaagttttttttattttaattaaacgttttattatagatatattttggttttaaaagtgttaaatttcaatgcattgaaaacaaccggattgagcatcccgtcccatcctacgggttcgtaagaggtgttattagttcaaccgcttttcacgcaagtagatttaactcttagattattttttatggtttttgttataaataattttattatgtaaacttatttttttaactagagtttttcttatataaaatattttggttttcaaaaatcctaagtgttgaatttcaatgcattgaaaataaaccggactaagcatcccgtcccatcctacaggtccgtaagaggtgttatagttcaaccacttttcacgcaagtaaatttaacttttagattattttttatggtttttgttacaaatatttttattatgtaaacttattttttaactagagtttttcttatataaattattttcgttttcaaaaaaaaatctaagtgttgaatttcaatgcattgaaaacatccggactaagcatcccgtccaatcatacgggtccgtaagaggtgttattagttcaagcgcttttcacgcaagtaaatttaactcttagattattttttatgatttttgttataaatatttttattatagaaacttatttttttaactagttttttcttatataaaatattttcgttttcaaaaaatctaagaattaaatttcaatgcattgaaaacaaaccggactaagcatcccgtcccatcctacgggtccgtaagaggtgttattagttcaaccacttttaacgcaagtaaatttaaccttttgactaatttttatgctttttgttacaaataattctattaagtaaacttatattttaactaaagtttttattatataaaatacttttaattaaaaaatttaagtgttgaaaacaaaagacctaagcatcccgtctgtaagaggtattattagtttaaccgtttttcatgaaagtaaatttagctcttaaattttttctaatggtttatgttacaaataatttaattatgtaaacttatttttatctaagcatccctccatcctacaagtccataagaggtgttattagtttaatcgcttttcacgcaagtaaatttaatctttagattaatttttatggtttttgttacaaatatttttagtatgtaaacttattgttttaattatctttggatcatattttttaatatgtttttgtttatgattttattttattttaactaatgttttcattctataaaatattttttttcaaataagctaagtgattgttaaatttcaatgcagtaaagcttcgttaatattactcatttacaaagttaaggttttgctgttttggtaatcaatctcaaaagtcaaatgttatttgctagaaagacgaatcaaacacagtttgtatcttttgaaatgtaattccaaagagataaaatcaacaagggaaatcatgcaagacaatccggctccctaaatgtaaataagagttccaaacaaacacacaagacgacgagtaaagttcttagaaacgggatcttggttgtgtaaaaatgtaaacctcgtcgtaacccctcctgcaagattatatgatccaaagaaatcgttaaaggacatcactgtcaacaactaaaaacaagagaattgtgcaaagactgttgtcctgagtggctttaccctgcgtatccacagtaagtaggcttatagttgtaaatgagattgctcagcactttctgagactctggtctgttcagtgacttcctagcttcactgcaccacattcaacccgcaatcattaagaaaactagtgcacaaaatgttgttgggaaaactgtgaaaacgttgatgagggagatcttacctgactaaataactagcagcatgctgtgtcacctggattgcatcctcagagtgtggaatcgcagatgatccccattcaaatgcatttttctacagagaattagtttagagtattaagactttttcttttttttttctaaaatcaatgttgtcaacactgagaattagtagtagaaacataagtttaattggtcagtttacctcaggatgccactggaagccagttattgggtatctctttgctttaacagttgaaacataagtctgcaaactatgatgattagatcttttcgcagagtaaggtcagattgtggaattcatatatagagtcctcatggttaatgggaagatattaccttgctgttttcatcaatgcaggttgtgagaatttcaaagaaactagacaaagcaggattggcttgaaagtttgctggtgtgataccatactagataataacaacaattcgtatcagcaagcatgtggaatgagaagatagtcaccgttcaaggaaccacagaggtaaacaaaataataagagagcaacacaattcctctcttcaaataatgcataataagttttaacttttgacaactatattccatattctgcagaagaaatagacattgcaatactaaccttgtgtttctgcataaccaaacaatctgtactgagttttttcaacaactctggcggaaatctgcaaacatgaattaatatatgagaataatttgaagtctttataaacagaaacctaaaaaaggatgatggaaaagctatgcacctttggaataatgttccatcgttattaacattatcaacaaactggagacttgatgcattatcctctgcatcaaatctttcaagaatgtctctgttctgttacaatgacaaaggattggagaggtttaagaatagaatctgcaaatcccaaagcaaaactatattgttgtattctcagatcctaattcatgaaaactatagctccctggctaccatggagggaaggaagattctttacttaaacagagattccagtactcagcaaaacctagaaagacttcaatctctacacaaggaaagaagaagaagagagtcacctgacttatgataattgacataagctcgaatccgaggcaaatgccatatactgggaaatgctctccagcatcatttctctccaaagctttctgtcagagacatatatattggtattagtattctgtgagcaaacaaataagtggtaaacgaagatgactaacttacagtgaagatttttttgacgatctcgaaataatcatattttttagcccaaccaccagtgaatatcacaccgttgaccaactctagcttctgcagatccaataatgtaattcaccaaaaagataacttaaatcaagcaatccaattcttcagcgcaagattttaaaacataataagacagacctggaagagcacttcttcaggttcgttgtagatgagtgggataacacgagcaccacctgcctcagcgaacttcacatacgaagcagcgatgtacgtcgagctcgtatcattggtcaaccgaccagacgcaccatctccagggtgactcaggataccgatgacaggtctgtagttgaggttcggatccggcgaggagcaaaccggactccgagaaccgtcaaatccggattcactagggagcaaaatcgactcagaagcctccttggccagacctatatcgttccaaagcaagaggaaaaacggtaaacaaatgtaacgccacatctcggagcaagaagaagagtcaatggtttgaaatgagaagtgagggagagagagtgacctgagtaagaattgcgattcagctcttctttatataaacaattgttgtcgatcatctgattcttctgcccaagttgtatatctcaaattactctccttgcacattcttccataaccaatccaccttctttctaaattatttgtaacaccaaaaacgtggatatgtattttattttttattaattacgaatttacctgtcagagtggggcccatgttttcagaataaaaaaatggttctagaagccagcgacgatgatcaccgatacactcaaacctgaaataatacagttttttatgacatgactagtttaataagaaacggctcaaaagttttttttcttagacacaatggatcagaacatacagtcagatgaatccaagttctgattttcctataatatcctcaactcaaacttagcaaacaataaatacaaaaaagaagcctttttaaactttcttgaagaaggacattatattcccttgctttggatctttgacgtttcctcctttcttgcttcccgcttttcctcctgcgtttgtcgctgctgtgtttccaatggccggactcttcttctgtgcaaccgccctgaaataagaaactcagatagatgctataatattgtattcgggtttcacaacaaacatgcttacagaatgatctccaaaaaacatacctgttaacagcatttgcggttttgccatcatctaacttcttacttgtattagtgtcctctttcttctttgcgttcgtttctgtctcctcccacactacctcagttactatatccagccaaaagagaattgtttaagtaagagacattgacatacgtttgtttatttttgttactatttagaacgatatggatgcttagcataccttctctcccacgatcatcaatccgtgacttcaacacctttttccttttcggcgaactaggaactgcagtagttcttctctttgagggattcacttcagcttcagaaccaatggcctggatcttctccgttgacaaagtcgtagaagcatcaacagaagcagtgttttgcctgtcttctttgctggcctctggttcctcagattttatctctggagaaacatctgcgtcaggcttctctggacctgaatcttccgaactgagttcgacatctggacgtgaattaacctttggactactaggagatgctaagctgattacatcttcatactcgtcatctgaaaaatcaaatatcacctttctttttctgttatctttaggcgctctcatgaaattggcgtctcgagtctcatcatcgctgcctcccttcttgtcagcatcatgagaaggtttttggggttctgcaccaattacataacattatatagaggaacaaaactagctcaaacaggcaccaagtaaacccaagccattgatagtaccaaggtggatagattagaaaacatacccgaatgattagtaatatgatttttcacatctactgttggagaatcatcttctgttttcacaggcacacggccccacatatttttcaacaaaccaccagttccagtcacgctcttctcgccctgtccattctttttattagcgggcacatgaaaagctttttctttatccaaagaggatttcgcagactgatttttagctggagcagcaatagattcactcttagcctgatggccaacattagagcttgagtgctggaaattctttccctggtttgacggcactgtactcttttgaaaatttgaactacttttagattgtcctgtagttctcacactttcagttcgcggggcggtaacattttcagtggctccctctatattgcgcttcacacaagaattggagacgccacaaaacctggtataaaagtcacacctctctagttagaatgggcaaggctggtcaacagtactggacagctttcatacaataacagaaaagttgtacctgttgcctttcaaacaattatcagtggcagaaggctgcctgaagagttcttctgcttgtacaaactcagtgttccatatggctgctggatccattggaatactagcttgaacactgtagatatgtactgaatattttccattgaactctttctctacttctgcatagaagtaatgacaaggaagagtcaaatcactttcgcttttgccatcacttaacttctcacttgtaccagagaaataatcaaaacaacatctgagatagtatcttgaactacagacaacgcagcaaattacttgtacaactacttggtgaaaatagaatcagtaagatgaaaaaccaaaagactagcaaaattaatcattatacagaagacagtcatgaaaaataacaaagagaaaacatgtcactgaatgagaatgagacctggaagttcggtactagaagcaagccttgcgtggtaatcggaaggtccgttctttagcaatccggacacaatatatacaacttccaaacccttcccatgtttctctacaaaatccttgagcaacctaataacaaacgagacacggttattagacaaaaaaccaaatctgccatttgtagctaaactctaatgagctcctaatagagaatggaacaatgtacctcttggccgtatttgatgaaagcgagaaatttcgactcagccatttgtaagatacctgaaaccaaatggattgagcgaatcagtagttataaccaaatgactcgattttacataacacctccgatctcaggactaacacaacaacaaactacaatcagaagcttcagaattcaacaattaactctattccgatgataaataaacgagtttcgacaaattttagaatcactgaagtggaaatcgaagaaccctaactagttaaattaaggaatccagaaatggagaaggaaatcggcaattaccacttgaagctgatcggagacaaaagactcgatttcatcgagcagatttagggtttcggtgtgggtcatcttttccgatttctcagatttgggaggttttttcttcgaggcgatggctgaattttcccgccagttctcgcgcggcggatgttcttaaagcaaatggaaatgtcatcgattcgatgtggttgtggaattgctgtaggcccgtgccactcacgtgatgacgcgattttgtttgggttgggccgcgagagccatcttcttattgctattatttgttcttagtgggcttgtacattcttcgaatagtattttggggtctagaattgaaattcggtttccatttggaactgaaaaccaacttcggttcagtttattgtaagaaaaataaagtgtaatttttcaatgatttcgattaaatttggtacattcctataatttcggataaagttagaatacaatattggtttggtggtttcgaatcgaacggaaccgattattatttttcatctttccttttggccatcggtttcacccaataaaaccgaaatgaagtagccaaaatttcggtttggtttatactatctatattttttagtgagtgtttcaccttatacaatccacttcttcttccagtgggcctcgtagactagttgtgtgagtctatttcaaatttcacgtcgtgataaactgaaaattgcagattaacgttcgagctcctccaatatctccagagaatttccatttctcccatgtaataatatccattattttttgttgatcaacataaaaataagtttgttgagaaacataaaaatatgtggaagagaattctgcgaacaaaaaatacgattttctattggaataaattattagggggatagagttttgaccaaattaggtcttattcattacaaaacctatatccttgaccgttcttctatatatactactctcatcaatcccttttactcacaaataatctttcgagtcttttctctataattatttcggacgataactctctcctaattaagctcctaaatctcagtcgaagaagagttatggccgaagaacagcgagagatttctcatgagaacaacgtttccttgggatccgcggaaacagcaatacctctcaccaacgtttctatatctccgacgaagaaggaagaacaaaaaactgtatacctggtcctgttcggaagaacaatttatgtggagtcctcttctttggaatccgaggaaacggtgatgcctattgtcgacgttcctaaatctccggcgaaggaagacttgacgactcattgctcgttagacgcggaatcctcggagaaaggcttccccgtagatccctatatggggattttaggaaacaaccctaatattaattccaatgttacttgtgcaggaaacaaagatttaactgaagatattataaagtttaagaagatgagatctctttcgaaagagaaaatagtagaggagaagggaaccagagtcttgacggaactacctccctacacatggaccatcaagaagacactgaaggaaagtgatatcaatcatcaatgccgacttttgctgaacacaaccgatgccgagaaccacatcatgagacatctccctacagatgaccaaaagaaaatccaagaaggcattggagtcgatgttaaagcgtacgaccacgacacgtacactgagcacgatatggttttcaagagacacgtcaaaacatcaaaaagctatgttttcaacggtggctgggctaaagcgtttgttgggaggagagaattgaaggaaggagacaagattggactcttttggggtaatgttgactctagaatccactttagtgtgcttgagagaaaaatccctaactagctagagagatcgtgtttgcagactctcgatagataatgaaggtgctttttttttttttttttacctagataaaatacagactctccattttaccttagttattattgagaaggtgtttttcttttctttgttaatgattgacattgaaaagttttttcttaaaattttgtgaatgaatcaattaaatgtgttttttaaagatgttttcaggtgactaatatgtttattaaaaacagagaattacggctggtgtccctcccccctgaccaaattacatttatgtttactatagtataaaaggaaaaaaaaaaatcattaaatacgtctacatatacgtaatacgtgtccctcccatcaatatcgatcaaagtttctctctaaaattgtctcaacgataactctccgaagttactgtgattctccgacgaagaagcgcaagagatggtctttctttcttagcatccaaggaaacagtgacctccttctccggcgaagaagagtcggaagaatataagccaagaatcgcagaagtcatctttcttgataaccaaggaacatagatctctatctccgtgaaagaagaatcgagccaagcaccacgaaaagaccactcaagatcctttctcttgccataaaataatacgaaaatgcctctcttcgtcctctctaaatcctcagcaaagaagagtcagacgtttatgagccaagagcagcaggggacgtctccgttgaacacagacgaagccttaaagagtcatcatagcttctcgcagaacccaaattacatcgaaagtaataacatcgcagctagcaaatcaaagatatgcttcacatataattcataacatcacttcttctttgtttgcaggtaatctgtctagaagataccagactaacttttcgcttggctcacaaagaatctctgggcagtttttgatgatccctaatcctggatttgtcgacacaagttcgatgacaaatactcacgataccagtctagcaaattttcagactgtgcctacaactaccaatccaaagattatcttgaaagaggaaaaagaaaatgaggaggagcaacagtactggaccatcaagaaggaactgaccaagagcgatgcttgccaacggcttactctgtcaaaaagctctgttgaggagcacattctcaagcatctccttccagaagattcccaaaagatagacaaaggcaagcccggaatcacggttaaggtatacgacaacgatactgacactgagcacgagctatgtctagcattccagtgtagctatgttctaaagaatggttgggtgaaaacatttgtcaaaaggagagggttggaggaaggagacatgattggtctcttctgggaatgctctacttctaagcttcattttagtgtgctttttcgtgtaaatgcaaaagctcctgcagcagaagaaaaagaagcttattaatacagtaatcaatctccattgtattaagaatatctgcattttgtgatctcattcagaaacgcgtatgtgtagaggaagtttttttcatgtaatcaaacattgattgttgttaatgacttgaaatgcataataaaaacttcaaagagagactgattgtaaaactcaagttgaattcaccaattagtccctaacaagctatatattcttgattcgtgatagatttgatcagatagaaagaggaatttggaacttaccaaaggcgaattcttcatcaaagtggaactggcggcggaagaagctgaacttggaagggaagcttcgagaaaaggtgaattggaggcatgactgaccggagagaattctcgggagaagaagatacggcgaggatgatgcgcgcgtaggcgcgtgaaggatagaccgttgtataaaaaaattccaacacttaaccttttgcagttagaaaaataagaccgttgtaatcatgatcaatttccttttttattataagtccaaatttgaaaaaaggaaaataataatctgatgtttccttttttttgttgcgtgaacctctctcttataaatagtattcatcttttcttctttccttaagaaatcattactccttcttctaaaccctaaaaaaatattttctttctctgcgactgttttacaaatacgatcgctgatatctcgtgaccgtgaaattgatgatccggatacatcgctgaacggtaccaacggcgttgccgcgttggtccaacgccatgtcgagagatgtctctcgtgtatgatcaatttttgacgatcacgggctaattatacaggaagattactttgagttctagaaacgagtctgacgtgacgcaaaatctggatgcatctatttcgggcaaagagaatcgcgagtgaacgtgacgacgagatctggggtttcggtggttcagagtttcagacctgaaaagcgagatcttcttcatcatcaaaaattgcagtttccgcccaagtcaaagacgaagagatgggcttcagattacaacgaatgggctttagtaaacaacaatccatgagtcatgccgagagagtcataattagtccaccatgagtcaggttcgttgattcttaatttccttttctttttttttttttttaataaagattttgatttattttatgtttgttattttaaaagtttttatttttttggatgctaaatttatataatgatacgaaaactaaccggattttagatccagcattagtcgttagcgattccaaatattcaacttgttttcatattattatgtagatttagcattcaagtttttcattcggatttttaaagtactttttaaaatttagattttgtttattcggattttaaaaatcttttttcatgtgtttattttttaaaattatattatttaatggatactaaatttatataatgatatgaaatctaaccggattttggatccagcaatagtcgttagcgattccaaacattcaacttgtttttcctattattatgtagattaaacattcaaggttttacttcgcattttttaaaatagttttaatattatttttttggatgctaaatttacataatgatatgaatactaaccggattttggatccaacattagtcgttagcgattccaaacattcaacttgttttcatattattatgtagatttaacattcaagatttttatttggatttttaaaaatagtttttaaaattttgattttgtttattgtcggattttaaaaatcttttgtgtttgtttgtttgtttttaaatttatttggatgcaaaatttacataatgatatgaatactaaccggattttggatctagcattagtcgttagcgattccaaacattcaaattgtatttcctattattatgtatatttaacattcaaattttggatccagcattaaaaatttcagttttaagtaatgactcgattaaggcatgaatattagattttccttgcatctgtgatctcattgggaaggtttgttaccaattgaagaggaagtttttgttaatggtgactactgttgcttatggcatttgtattcattacatgtcatctttttcatgttgaagaagatattcagtagcaaaaaaaaataacgagaaatatttcaaattagaaagttttgtagcataacagagttgatagaagcgaaaacaagaatctgtaaagcctcctctggttttgggatgaagaaactacagaaacctgagaagaaaaaactctctgcgcttggcgataatggaacagtggtggagcttctatttttgcagctgtattctcttgtccctgataggcagatcaagcggtttctgggcctcgtgaggatggtcagggcctttgtacaccttcaggtgattgaacagagctctcccaagctgccacaaaatggtcagaccaaagttaagagggagttggaaaactagtaatcaatcaataccaatatcgcaacaagtagtttccaagttcaatccataagtttgaagaaacacggatttgctaagtgttaagacttaaaggagactaataaagagctgtggattatgtatctaacccgtccctttggaagcattccacgaacagcatgctcaacgattctttcaggaattctctgctgcaattgatcaaatgtctctactgtcataccaccaggtcgtcctgaatgcctcctgtacagcttttggttacgcttctttccagatacagcaactttctcagcattcacctttaaccaaacaattgaaaacagtattagaggtaccaagttacaagcattgcccaaacatctacatagaggctctacatcttgctgctaatgtgaatcttactaaaaccaaatcccaaggctcctccttcaggaagaaattaactaaagcagcacatcaaatttcttattctctacagatagctcaaagaaactcataccacaatcacaaaagctcccatgtcgacactaggagtgtaagaggcaagattcttcccacggatgtgattagcaattgtcgatgccaatctaccaagaattttgtcagttgcatcaaccacaaaccagggcttgtccgtgttcacatggtctgaagcttttggataccatgtcgtgttccagatgtcctgtaaaccatagaatacactcaataaaggtttcaagccaaagacttttaacttctctccaaccaaacattaataatttcataaaacgtccaagttaacaaattcagaagaataaacatcaattttcgaagccaattgatgcagacaacacagctaatgagtcaaaggcaaaatccactacttaataaatcgcaattgggagaagaaaaaaacaagccatacttcaaattcaaagcaagagctaaagtgcgacactttataaatgcgtagatgctaaacacagagggagatagaaaaattatcgttacagggccattagcttcttcttcgtcgaacatccatcgttgattcgccggaacaagagaagtcgtcgtcgtcggctcagcttcacacttcacttgcaatcctcttttcgaattcgcataaatgccgactcgtaccgacggcttcgagatagccgttaaagagaaccctaaaaacggagactttctctcacttccggaggatttcacggaagaagaagagagtatcaccgtcgaagacgagcaaagaaccgccatttttgtttttctctcttctgcaaatttcttctgctctttccgatttctcggataagattgggttctcagtaaatagtagtagtggcaacaccgtaaataatctgatgaatacgaccgaaaaataaacacaacacgggttaaggatccgggtttttttcggagctccggattcaacccgaaatactgttttttttttctcaataggagagaaaggtcttcttcggaagcaagctaagtcatggcaacgatttcgtcaactctactcttaaattcttctagatcagctttaccactaagattcccaaaattctcgggattttcttcttcctctccattcgctagatcttacagatttggacgacgtaatctggaaccactttccaacggaatgctttcgtcgggaagtagagccgacggtgctacggcggcggctgcatcgatggaaggagtgatgacggaggcgatgaaactgattcaatcggcgtcaccaacttggaaatcagctgtggctaacaatttattgatttttgttctcggttcaccgcttcttgttaccggattgtccgcttctgggatcgccgccgcgtttttgcttggtactttaacttggagagcttatggctctgctggtttcctcttagtcgctgcttacttcgtcatagtaagtgcatttgtgatcaacctgaatgtaattcggtaactgactcttagaacgtagaaattcgctgctttgattttgatttcgagctgatgaatgaagaatgtccttagattttagatgtgttattgtttaatttaggaattgtggacgtgttagagatcctaaatcacgtttacagattaaggagctactttttctgatcatgctcaacattgagatacttagtcttttctctgcaatgctttaagttttagatttcaatatcgtgtttcaccccagagctggaaatagtaacagtaaatttgcaattgattctggcgctgaagttggtttagatgatttacaatatcacagggaacagcggcaacgaaggttaaaatgacgcaaaaggaagcacaaggtgtggccgaaaagagaaagggtagaagaggaccacgcagtgtgattggttcaagtgctgctggttgtgtctgtgcttttctttcaatatatcaagtgggaggagcagctttttcccagcttttccggcttggttttgtttccagtttctgcactaaagtatctgacactgtctcgagcgagataggcaaagcttatggaaaaacaacgtgagtatgctactgttatccagctatagcctcttctgttatggtctgtgtctgttttctgtctgatgtatggcatggacttgtggtgtcatgacatgaatccaatcgacaactgaaatgatcttactaaccattgccaattcgcaggtatttagctacgacatttaagattgtaccaagaggaacagagggagctatgagtcttgaaggaacattggctggacttttagcatcattttttcttgcatctgttggctgcttcctgggtcaggtaatagtgttatttgctaccaaaatttcccttcacagcttctttatgctactaaagactgttatcattacacgatttttaaacttcttttccttttgatatcttgaacacagataactcctccagaagcagctgtatgtgtactagcttcccagattgccaatcttggagagagcataataggtgcttcttttcaagacaaagaaggattcaaatgggtatgctcacttcaatgaactctcttctttttgttttattgatctcactctgtctacttgttgtcaatgcaagaagatgataatcaaatgaatataccgtcacttcttgcagaaagactgatagataactggcttgagtggaaaacgatttccattcaatacagaattttgaagttttcgtcttatgaatccattccttgcaattagttaccaactaaacaagaatgcaatgatctcgactgtattctgtctcatgttagtcactattttgctatgtgtagctaaacaatgatgtagtcaacgtgatcaacataagcttgggaagcattgtggcgattttgatgcaacagtttatactccagaactgggtcaagtaaaacctgccacgaaggtcatgtattctcagtgaggttagattctttttttatattgttaaacacagccttacgtattcagtggtgttataaattatactctgttgtgtacaactagtagtccaacatcaatgaggggaaaaaacttctgggaccattgtctagcaattattggatgatatttatgtgaattaagtttgcctttgcaattgtcccgtagatagagaaacttataaaatttcttctgcttagggatccattcacgtgatttcttctatttccttcacatgaagtccaaattctattgcgacatcataaattgaagaacatgtaaaaaaagttatgtagcaaatagagaaagtagtgatgaaaatgtaagaaaaaagtttgaagaaaaggcaacaacaaagtaccaagaattggttgagaaagaagtcgtcgaagagtcgtgattttctcgaatacattcttcttttttgtcattattatgtcttgttcctgtcatctttagcaatattctcgacgttgcataagatagtgtttctggtggccaattttaatttagaagcctctagagaaaaatgcatccatcggcctagctgttaaacaagacagcgagacttaacaggcttgtttacttttagacttatgaaacatgaagaaaaattatacaatgcgttgcttctacgaacctgtggtccgcaataagatacgacaatggcccatgggccgcaacatctgtctaacacacagctgacaagtgtcaaaattcacacgcgctcctcaaacgcgtgtattttacgactgatttttacaccgccgcagcgcaaatctcgctttttctttcttaaagtcaaatgtccgccacggcgcgcctgaagaagactcttgcttgccctttttcttactttttttcaatgttttttcacttttttggttaaattctctaacatgggtttactactgtctcgataatagtagtaagtttgtaactttcttatttctggaactgatctagttctaaaatatgcttaattctttattaagttctaaaagaactactttaaaaattaataacctattattaattacgacaacatctaactaagccattaaatacaatattcatcgttttgcgtgagtccttcatacatgtgacgaatgtcccttccccacaaaggcacaaacctaacctaataaacaataccaaaaatggaataatttgatttttttttgaaatactatatgctagcgtagaatcaaacaaaatatgtaaaacgatatccttaaaacaaaatgtatactaaacaaatattagtttgccaaagtttgacgaaataataaaaacctaaatggttcgccgtgagtaagttcccatcttcttctcgaactttgccaaagtttggtattgaaaaaataataatattaagacacagagagagagagggagaagaggatctctgtgtgtcgtccaaatttcaaagtgatgatgttgtagctgtgtggtagcgattggcttacacgcgtcatactttaattagataattttatttccttattacttaccctctcttttctcacaaagagtcatcaccagctctgatcaaataaaagcgttttctcttcttcttgctttcacagttacccaaaagtgtgattaaatctttcttttttttgctttccttctctaatcgttggtgtgtacgctaaacctagatttcgctggattgtttgagtaatggccgttgatgcggctgaccggcgagaagttatcgtcaaaatcgacggtgaaaacggaaacaacaatggagtctccggagagactgtaggaaagatatggagagacggaagctacgatttttggactgatggtgaaggtaacctcaacaaaggtcataatgctgcggcggttgattctgatagatccgccgccacgacgggggagcaacaaaaagatgagggttttgagtttcgtcgcggcgaagatcctcccacgaagctgattggtcagtttctccataaacagcaagcttccggtgagatttgtttagatatggacttaggtatggacgagcttcaatctagaggtttaactccggtatcggaatctccgagagtttctacaaaacgtgaccccgtgggaagacgagacagtcgcagtaataccaacaataacgatgatggagaagttgtcaagtgtagtggtaataatgctccgattcagagaagctctagcactttacttaagatgagaactaggtcacgtctttcggatccgccaacgcctcagttgccgccgcaaacggcggatatgaagtcgggtcggattccgaaatccgggcagatgaaatcaggtttttttggaaaaagccctaagactcaaggtgaggaagaagaagatgatccatttgcagcagaggatttaccagaagagtataggaaagataaacttagtctatggattgtgttggaatggttgagtttgattttgattatagctgggtttgtttgcactcttgcgataccttccttgcgtaagaagaaactctgggaacttcagctatggaaatgggagtcaatggttttagtgttgatctgtggtaggttagtctcgagctggattgtgaagattgttgtcttctttatcgaaaggaactttcttttgaggaaaagagttttgtatttcgtttatggtgtccgaaaagcggtgcagaattgcttatggttaggacttgttttactggcttggcatttcttgtttgatgagaaagtggctaaagcagcaaacactaaggcgcttcgtgttgtgactaagatctttgtgtgtttgttggttgggttcttgttgtggctcgtgaagacactgttggtcaaagttcttgcttcatcgtttcatatgagcacttacttcgataggattcaagagtctttgtttactcagtatgtgattgagacgctctcgggtcctcctttgattgagatccaaaaaaatgaggaagaggaagagagaatcagtgttgaggttaagaagtttcaaaatccagggggtgttgagattcagtcaggagctcagaaaagtccaatgaagaccgggaaaagcccgtttctctctcatgttctatctaatggaggagggggaggaggagaaaacaaagggattacgatcgatagccttcataagctgaatcctaagaatgtttccgcatggaaaatgaagaggctgatgaatataatccggaatggatcacttaccactttggatgaacagcttcaggatccaagcttggatgatgataaaggaaaccaaattagaagtgagtttgaggcaaagctcgctgcaagaaagatctttcataatgttgctaagccaggatcaaagtaaagaaaatcacttttttctttatacaaaggctttacaatagtattgcattatagatactaaccagtagcaattgcttattttctcatttaggttcatctatgcaaacgacataatgcggtttctgccagatgacgaagctttgaagactttaagtctctttgaaggagcatctgagacgaacaggatcagcaagtcatctcttaaaaactgggtggtaagaaatttggaatgaatttacactctttaatgaattcagatattaatgaaaatgtgcaacaaccttttcacaggtgaatgcttttagagagagaagagctcttgcattgaccctaaacgacaccaaaacagcagtaaacaggcttcacaagatggtgaatatcgtggttgggatcatcatacttgttatctggcttatcatacttggaatcacttccaccaaattcctcgtcgtcatgagctcgcaagtcgtggttgtagcattcatatttggaaacatgtgcaagatagtatttgaatctatcatctacttgtttgtgatacatccgtttgatgtaggcgatcgatgtgaaattgatggagtccaggtaacttcaaaaaactagtaactaatagttctcatttttcaattctaatgtttaaaaaacttcttgtttcagatggttgtggaagagatgaacatattgacaacagttttcttgagatttgataaccagaaagtcgtgtacccgaacagtcttctctggactaaatccatcggaaattattaccgtagtcctgatatgggagatggtatcgaattctccatccacattactactccagctgagaaaatcatactcatcaaacagagaatcacaaggtacattgcaaatttggaatcacagtttcacaaattttaatacctgaaaattcttgtatttcattacctgcattcgttgttgtgatagttacattgagggcaagaaggatcattggtatccagcgccaatgatagtattcaaagacatggagtcattaaacagcgtgagaattgcggtttggccaacacatcgaatgaatcatcaagatatgggagagaaatgggctcgaaggtctcaacttgttgaagagattgccaaaatttgcagagagcttgacattgagtatagattgtatcctcttgatatcaatgtccgaaacttgcccacttctacggctttgcctgtttccgaccgtcttccaccaaactggagtgctccagcttctggcagcaactgagaaactatagataaaactttttatatagtttggatcaagaggttctgttttctcatttttcttttatgagctctacaaatttagaattaggattggatacttgatgattactctactttaatgtgatgtataaattttggctctctcaatctgcatagtggtctcatagtgtttttgccttttggatttttggtttatgaatactgcttctaatttcggttagtccaaacttaacggtatttctcttttctttttcccggtttaactgaattggtcaattgatgtaactcttcccccagggatagtaaacaagatgattaagcatgacgcaaaatagaacagacaccttttgaaaaatcatgttaagccaaattgataacttagtaatttaaccccttataatcttcaaccaaataaacatctttttgttttttcagctaacaaagaacaccgactctcacagatcactacattacaagtttccaaatcatttatgtgatcttacatctactgagaaagctgccaatctcttttctcaagcggctaaaagataattacaaatgctagaaccgtcgccgccgtttcccaaccctttgattcggggatgaaccggtataaggagttgaagaagttatgtccggaacaaacacagagtggtggtgaaaatgcttaggccagtttagaccagacgctgtaggtggagactgaatctgtggaaccgcccatgatgtctcacctcccaagcagttattgttatcttctccatcttcttctgcagatctcatcatcgaagaactgtctgaatctcctcgtctactagtatccgcctgtaacaaagaatcgagcttagaaaatgaggaaccaaaagaaatgaatccaaaagccacaagattcatcatactttttccaatttcttcccaagacaagcactatctagaagtttcatcttgagaacgtctgtctcaagaaccaaaaaagatctcaaatcaatcctgatcatatactagatataacaaaactgttaccttagatgatccattattctccatgtattcatagctctgatcaaagtcggttagcccgaaaatctcctctatttgccactgaggaatgcttccagtagttgatccgctacttacgagaggaagctttgtcgatgtctgatcattgactttagttcccggtataactccttcctgctgttcctgctgctgctggtgatgatgatgatcgaaggccatcttttgaggctcaggtatagattgaacaaaaggtttggtctccatggttttatcatcattggtaggtgaggatttagtagaaggaccagtgtctatagattcaagaccaactttgattccagtgagaagaaatctctggtgagctgaaacatgaggattcacagtgtggattgcaacatcacatttcctacatagcaaagctctatcttgcagacaaaagaagaatccagatgcttcctgtacacacaaaaatcccaaatttgagaaaaaacacactaacagaatcagaactaaaaaaactggtttatggcctctctaatcctaaaaagattcaaacttttctctaaatattgagaatttcagtcaagggtaatctgaaatcagatcaaagattttgtaaatcgagagaaaaagtcaaagagatgatgagacctgacaaatgtcacatttgggtatggaagaggcagaggcagagagagggactctctgatgttttccggcgagtttattagcggcgtgaattttctcatcgcaagcccaacaaagagcagcctcgtcggcgcaacatagaaccgtcgcttccgccgcctcacaaacgttacactgaatcttcatcttctcttatctcaaactcatccagaaaacgcaaaaagctgtgatcttttttagctgaaaagattcaaaatctcgagaaaacgaaactttataaggttgataaaattttgagcttgaggtttatggtttaagcaactcatacgttttctctttggattttttgttgttgttgtcaacttctttgatttttatttgtcatcggaaaatgtgattatttataatttctgactaaataaaattagttgaatcatttggatttctagataagtcgttgttggaaaatatcatttatattagtaaaataataaatagtggtaattttaggaagatttcttatcaaaaaaaaaagagagggtctcagtgcactatttgaaagtggtggggtagatttagaaatatgaaggcgttaaaaggagatatttatttttagactatagtatatgagtgaacaatggatagacacgtgaaaaatctaaatacaagtgtcttaattgcaggagaccgtctttgctgtctcaagctgtattgtaatcaaaagatcacaaatattaggtccccaaaagaaaagaaaaatgatttttagctcttttttttgcttctagatcttttaagaagagaaaagtttataaaaataaaataaaattataagctgaaagtgactgatatgtatgtttcaagtagaatatagtagaatatctaagtttcaaacgattgtctattcattttgaccacttttttttgttatgatatagaaaattttgtcccggttcatgcattttcagaaaaatctttcattatgaagattatatgaatccacgtatggttacgagtagaggaagatgattcggacctacataagacgaagatctttattcaacaacacaagccatagacaatacaattaacaggcaaaggacaataataaatcaatcattaataaggtcccattttgaaaaagatattttcccaaaattaacattttgcacggaaatgagatatgaattctagatgattttgatattatttttctttaaatataagttttattcaagaggattagacacatccacgttcttggtaggagaaagatagctacttgaattaaacttcttcaagcaccaaagattcaagaatcaacgaatctttcggaccaaggaatcttttaccatatctacagacaagtgggctcttaatgtgtaccaactctaactttatgaacaaaatctaccattgtaccaattctagtaccttgatctgatctgagatatgccgtgtgacaagaaaacgtttaagactggcgcatccgatgatatctcgattgtatctccgagctgcacgctgtgttgaacctgacaaccatcgatgtagatagtcccgtggtctgaataccagttaacgtccatgaattggtctggtttgaaggtcgaatgcattaacgaagcggttgaaccaggagatattggctctctaaccatgaactgtagatcacgagacaacattggcatcacgaacccacctgctgactgcattgctgcagttgaaccagcagctgtgcagattcttagaccgcttgagcggcagttcactgtctttggactgctcgcaccatctttgttcttaatcctgcacacattgtaaagaacattgattcataactgttggatataaaagggatgtccaacagtttaaccgaactgatggtttattccatatccaaacatgcaggtgtaaccatactaatctgaaaaggggaaaaacgaataaaacctgttttttgataaaccattcaaaattctaggtgtagtttctacaaaacggtatccaaaccaaaccaaaccaaacccaatgcttataacaactatccaactgaccaaacgagggattatgtctacacaaaataatcaggtttaaaagaatgcatggtttttaatagtaggagctcttacttgaaagagaaccttgaaaccgcagcagggcatggctgtgcgatcaaaatgtcattaagtgcatgtgaaagaagagtttctgaatttaacttcaatgatattctcgatacttttgcaggaaccactctgccaaacaaaatgtcatccagcacctgtgaacaaatagctgaatgttcaaaccaaaattgcgtaatcattgcatattctaaggatcaagtaagagcataaatgggttgcctaacgttcttccctttctatttctctacctgttcaaaattctcgacagttgcagcacaaagatgaccagtacttctactagcgtcaaactgatcgctcagttcttcgacctatagttataacaaaccacttagattcttttttacattctttatatataggaatatgagaaaaattgggctacaaaacctcgtgagcttgtgttgggtcagaattgactcctagaaccggaacagagtcatcaatgaaatgactggcatgcaagagggtaccgtctccacccacggtgatgaccatatcaacatcacgaatgggatgcgataagtcgttacgtgaaatgggtttccactcaacaggcttcttacttagtatttcctgacaaaacttgatagcattcttgtgtactttgcacctgctttctagatattgaagaacctgttaaacaaaacaaaacccatttccattaaaagccacgagaaaacaaactagaacattaacaaccataggtctttgagctaagctatttcttagttacttatttgtatacatatgagtaaacactgctgatacgaatattttcaaaattcccaataagaacccaaaaaaagagttcctttttcacgtaaatgtcaacgtttcggttataatctgtggtgaattttatcaaacaacttcaatacaaaacgaaatagacatgatcgggattcaaaatcgagatgagacgcatttggggaaggtaattaattagtacctgaggatttttgatgagcgatgcaccttctgtttgaaggaatgggtacggatcaatcggtttcaaaagaagcaaaagcttcctaatcgccattgtcgctgaatcaatctctattcctcggcgccgcgctcaccggactggagcaaaccacgtctgaagagagatattcgtgaagtcaccactggccctcttttccgtttagagggtctctctaaaagagaaaagtctcgagcccaacaaaataggcccaactacaattattgtactaaactggcctaactccaaaattcggaccggttcacattgtcagttacgaccaattctagaagtctggcccggtttgatccttgtaaaaacaggttttggacctcgatatttctcaatttaatgttcatttgttagagatgttactgaattttaagcttcctgtactttgaatatcaaagttgatattaaaaaaatatgtaatgtcttaaatattttagaaatctggatattgataaaattcaatattttgagatcttttttccttttccgtattgaggtcatattctagatgcatatgtctatttcaatttatatactagacggtcctaaccggtcccctgtccaaccctaactggactacttggatataaagccggtcctaacgtctcgcctaatgggaacaacccttagtaggatcagatcctccgtatcgagtgcaatcctttatagattgtccggtctagaatcttatcagaagtggggtaagttttgagatctaaccggaccggttatgctccacgtatgttgataattttggcactgcgtagcgtaatatatagtggccaacaaaacctaagaatttgacctcgaaatatccgaattcacgtggtttttgtctctcctttggccaaatttagtaagctattgtacgagctctttaattgaacaacctaagacataacttatagttttgtccacatattatatttttgaatggtgacaaaatgggacgaaattaaacaatgctataacctaagcaagtcaccaaacataatacggacaaattattgtggattgtacatgaacgcatttcctaagaaaaaggtaattagtatgcttcacatatattattttatttagttcttaacctaagaagtgacgaaactatctttgttcttgtgttatccatattctgtatcgaatggttaattatcaaattcttaaaactagagtaaacaaatttctacaatgtgaatcccttgaatcaaataaattttgatttcatgaatcctacttaacattaaataaattacgattattaatttcgtatctttttactaattaggttaccctataaacgaatctcatccaataaaaatctctagaagctggcaagcaatatgatcttttcgtttttatcaaccaaaagaaaaggaggcaaaaaagttgcaagaactagagtaataatttaaagctaacactacgtgcatggaaagatcaaactacaaatagtgaccattctctaatctttatcttttttgacgcgtggggtacaatctccacatccattggccatcttattagaatttagatttaatctaagcatttgcaatcacatattttccaacgcgtagtgattagtgaaattcaactacaaagctcaactaaaatataggccgaagaagttgacccaatattaaacaggctcaagatatctcaactaggtaaattcaaactgattaagttaataaaactcattattgcattgaatatttttctattaattcgaaacaagaaagtgttgtacaaataacaaaactggacaaaaagtgaattgaaagaaaccaaatcattattttttccttaactcctgtcgttatcttccttgaccacacaatactctggataagtaattaagtaatttgcccatcaacaggtcaacttaaaaccccaaaaaagcttcaaaaacaaaacttattgatgtttcttaaatctataaagtcataacatatggaactatggactagctagttatgtaaatctgtttcttaatttacactttaggatagtgctaacattttaagagcagaaaaagaaaacacaaaaaattagtgcactgacaacggcgaaaccactggtaatttcttaaccctcaagttagatcttaaagcaataaaaaatggtcgtcgacaacaacaacaaaagccatacaaaaagttaattaagaaagataaataaagtttagcgaaaagttacacatgctaccacgagaagcatctctaatttaattatatttatcaacatagaatccatggggaagaaaatttctaagcactttacaagttgcagcctttgtaaaagattcgatttgaaatctcatcagtcgtctgaaaatggaatttcgtccgcaactgtatactcgaacacgttgacgcaatcagattaaatataaaacgaatatataaaaccgtatgtaagataatattaataaggttaatatataacagcaatagctacaaaataggaatcgattatttggtttagttagtgaaatttatgcgatgatgagtcagatgatacccatgaaccaaaagttatacgctgacgtaaaggtcctcgtcgtggtctctcatgctaccaatcaaattattctatgcattaaaactttccagatgattaagcttttggaccataagaaagagtactataatattttgctgaaaattttagagctttgagtttgctttaacagtttttaagggatgtttaaactataaagtttcgaacagctagctctaaattattaagaatagtttttgcacgaaagttcaaaactttactgcaacagaaatagaaataaaattgaactttcattttataatattacttagatccaatccaaattatcttcagactatgtatatggctgtgttttacaagccgtaaataattttttctaagcataacactaattggtatatatagcatttaaatagtcactttctactggactggctaaaccaactgcatgacaatggttgattagcatgatggctcaatctttaatgtcaactcaaactcttttttagctcgaactcccatgttagagttaaaagaagtgtggttttagacttattgactagcagttgaaaatacctaacttacattttggaagaaatatatgtcaatgaatatttattttgtctcttttaaaccaataaatactaatatatattcatttaagagtattggactattagactaaatgactaatgcataacacatgtcatccctcatcttatttgtttgttatttttcttaaaagatctattaaatgttgtataaaaaatcaagataataatagaaaaacaggttttaaatacggaagcaataataatatagatttgatatggttacttttggttgtgagtgggggaatatttatattttggttgacgaaaaagaagaaataacaaaaggaaaaaaaaaaagaagagggaatttaaaagggggaacaaattccctccaaatgattgggccataaaccagagacaaggctcaagccaactctgcttctatctatctctcactctactcataaaaatctccatatacgcttcttcttcgttctctgatttgctggtgcgcttctccgtcatcgttcgccgatcatagtcgatcccgccgcttccaggttagtcgtttattctcgtctgccttcgatctcctaatctcatcgtgttccgttagattcgctgattttgattcgtttaagctgtttctcctgggattcggttttgtttttgttcttattttcaatcgcgatgatcgtctattgatttttccccctgattgctgatctgtttttgaaacggttccagattcaaattatcatatctatatatatcgattttgtttgatctctgattcatatcaatatatctagtaattgattagatgattggattcgattttgctctgtttgaataagtttccggaatttaagtagaatttgatatgcaagtgattgtatttggatcctagaacttgatcttatgggatcataatccatataaaaagtagactaatgctaatttacgttagattagagtgacacatcttgtttcctgtttaaggcgtttactaatcttatttggtttacttactgatgacttatgagtgatgaccaccacatacataaatttaaaattataggatgctttctgtttcaatatccaaaaagtatagtaatgatggtgtgtgttggttgagttataacatcatcaactattgattggataataatctcgtattttttagcactaaaagactcatttgcatgtaaacttttccatagaacaaatcacaatcttttttagtgataaatattgttacatctttttcaaaagggatatttttactcaatatagaagatctttggtagggtcctagtgattgtggattccgtgcctacttgaatgaggtcactgcagtcttcacgggaaaaagcattttcattcttatgcaatctctcgtttatctatctagtttggttgaaacagtgccacttggttacattttagtcttagatgttattagaacagatgcaaggtgtaagagattcttgttgcatagtcatgggagttttcttgtgtgtgtttttgtttacttcactcacatgtttcttggggtttcttaacttatatagttagactttcaactataaatttgtaaactacaggacataggcgtaaagcaaaagtgagagagcaaatcgtataactttatttttgcataaatatatgatgcccttagatttgctgtcttattaggtggaccaccggtttcttatactttacttttccttgttttttttttttttaattatcgacacatacaattggacgcattatgtgttgtccacgcacacacactaatactactgtgtataaacactaagtcgtcttcttcttcttctaccataaaaaaaggaacatcgtgtcctcatgcttgttgttagcttgggaaatcatgcgacagtttttgtttttaatctattttcaaagtcaatatatgaacagtaaggtttataacaaaaataattgcatccccgacaagaaagacgttgaatgatcgatcttttgaagccatttcttacttactgtacattgttttctaatgtgcatatcattcaaaagtttgacatttgttatctctgcaagagagtgtgttgtagaaagtcagttgtcgaatttacccccctttttcaaaagtcacattcaggtcactgcttggaaaagaaacactttttttctttctgactcgggtatccgattctcttttcttctgttgttactaaacaagagttaatttgcttgacagtagtcttataatctttgggaaaaaggttagttaaattgtattttatctggtgtctttgtgcaacattatagaagacactaacttaagcatcctcctttatgcataatttgatttgaccccttacttgttagtggttgaaagctataacgaatatcaaattggagtttaattaatcttattttcacacgtgtttttgacattgtggctaccaacaacatctctgtccataccaagtgcttgtttaacgtttacatgagacttcagtttgtttgttttttggctagttaggggtaaaaattccattcttcttttttattggtctgtaaaaaaaattccatttcaagtaagaagaaagggagatgtttctacgttgtattccccatagtcaaatctaacgtcagcttcggccgagtgagaggggtcaatttcattcagcttaaatccaacttttttttctatgtctcataaataaatttctctttggttacaaaaaaaagtaaaaaagtttggtcaggaagagaggagcgaggacccaccgattacgtcatctcgtctaagaagtaatcagaaaaaaaaaaacctaatttttaaaataaaaacatcttctcgtgattgcgaagtttgtttgtgtgtgctgtgtggtgaagggtgatctctctctccgccccgaatctccgggcgatgcgatttttatcactgttggtttaataatctacttcacggtggtgtgttttaaaataactgaaatagttccggtcgaaatttgtaggttttcgagattttttttttttttggttggaaaaataaaaagtctctgttttcagaccgaatcttttgatgtatcacttgcatggctgtgaaggctctgtgtagcctgtaaagcttacacgaggattttgttgctccccttaatttccctctaatatctctccttctctctctctctacgataataatgtcttctctgcaccgtttcctttcgccttctttctgtccgtttccaaatttctttcgtttcttctttttggctctatttacttgccatctctctcgatgataacgacatgaaacccacctcaaacaaaaccacattcacttattattagcctttgtttttttttgagtggccgtgaaggtgtgtgattctggtgccctttcttcctttttgtttccctgcttaaggtattcctgatttttttccgtttcttgggatttattctgtgccattttttttgtttctgtttccaaattcttggctagttaattacgacctcaggatcatgtggatcctgttctttttgttatcctcttcatcagtgtttgacactatcttgtgttttttccctctttttcaataaccttagatgcttattccttggcctgatgggacacaagtgatatcagtgtatggtgatagacaacgacattttcatattcttccttttttttttttcttctttaatgttatttatgtttttttacttgacacttggtttcttgatatgtcctgatttgctttgacaacaaaaaatgcaggttaccgttgatagagtggtgttttggttctgttttggtgtgagcgtatgcctggaaataagtacaactgcagttcttctcatatcccactctctcgaacagaacgcctcttgagagatagagagcttagagagaagaggaagagcaaccgagctcgtaatcctaatgacgttgctggcagttccgagaactctgagaatgacttgcgtttagaaggtgacagttcaaggcagtatgttgaacagtacttggaaggggctgctgctgcaatggcgcacgatgatgcgtgtgagaggcaagaagttaggccttataataggcaacgactacttgtagtggctaacaggctcccagtttctgccgtgagaagaggtgaagattcatggtctcttgagatcagtgctggtggtctagtcagtgctctcttaggtaagtcataaatctcttatcgttcctgctctcatttttaatcactggttcagtatccaagacagcaatgaacaacatgaaacaaggttttagtaggctgacataaaattaatgaatgaacttatgaaggtgtaaaggaatttgaggccagatggataggatgggctggagttaatgtgcctgatgaggttggacagaaggcacttagcaaagctttggctgagaaggtacatagtaactcttgctcatgtggctgccaatgataatcaccttgtgtatacttgagttttaatttgttgtcctcatgattatagactatgtcatttgatttcttgattatgtgctcttaacttgcagaggtgtattcccgtgttccttgatgaagagattgttcatcagtactataatggttactgcaacaatattctgtggcctctgtttcactaccttggacttccgcaagaagatcggcttgccacaaccagaagctttcagtcccaatttgctgcatacaagaaggcaaaccaaatgttcgctgatgttgtaaatgagcactatgaagagggagatgtcgtctggtgccatgactatcatcttatgttccttcctaaatgccttaaggagtacaacagtaagatgaaagttggatggtttctccatacaccattcccttcgtctgagatacacaggacacttccatcacgatcagagctccttcgctcagttcttgctgctgatttagttgggtaaaaatctctactagcttctatgtattgcaagtgatcttccatggtattagctccatgtgacaggttcaaatctatgtgttactgtttcaaccaatcttaagtggtttgtctggttgagaactagtctaaatatcgaataatttatctccatggtacatatatagaggtgaaatagttaaccatgtgtagcttgatatatctaggatctgattgttggtaatgattcagttcttttaggtggtgtaagaatttactttgactgtgtataatttggatccaatggtaaaaatactacattggttattttagtaatgagctgatggatctttattctgttttcggaaagtaacatgacacattgtttactttacagcttccatacatatgactatgcaaggcactttgtgagtgcgtgcactcgtattcttggacttgaaggaacacctgagggagttgaggatcaaggcaggctcactcgtgtagctgctgtatgaccatttcattactttgaccatttacacttatcatgccgcagtgatagaaaagctaataataccttgtcattgtttgaaagccttgtaacagaattatgtatttgcttcggatttcagtttccaattggcatagattctgatcggtttatacgagcacttgaggtccccgaagtcatacaacacatgaaggaattgaaagaaagatttgctggcagaaaggtacgaaagagccagttcccatgagaaacccctaactgtgttacaatctgtttgaaatctcttctcaagcaagtcaatgaaagtatcacataaaagtgtttatttgactctctttacttaattttttctgttgacaggtgatgttaggtgttgatcgtcttgacatgatcaaagggattccacaaaagattctggcattcgaaaaatttctcgaggaaaatgcaaactggcgtgataaagtggtcttattgcaaattgcggtgccaacaagaactgacgttcctgagtgtaggttttctttcttggagtctctttataatttagcttcactcgtgaaacaatacaaaacatctgctaaaatgtcccttttagtttatttatagcttgttctagtcacccattgctaatggatgctcttcgggatgtatatttccttctcatacagatcaaaaactcacaagccaagttcatgaaattgttggacgcattaatggtcgttttgggacactgactgcagttccaatacatcatctggtctgtttttaaactctttatgcttggtcagcgagttggatattatgatttctcacgagctgtagtttctttttttttttctccaatggaaaatgatctgtgataatgttgaatgttagtactctatggcacttagcattttgtgagttgcatccttagggattgaaaatggtcttagcagaccattatttctggtatcattgatagagaaaatatcatctgcatcatgctacatattcggtgttctggatcttatagttttgaaaattcaactctgacgtaatgctgataaaattctcattccctctcaggatcggtctctggactttcatgctttatgtgcactttatgccgtcacaggtaatcgtatggctacctggttacattttgtatggcattctactttacaactctcaaaaatgttactttctgccatctgataactttctttgactttcttgcttcagatgttgcgcttgtaacatctttgagagatgggatgaatcttgtcagttatgagtttgttgcttgccaagaggccaaaaagggcgtcctcattctcagtgaagtaataactcttactttgcagctttttaataaagttataatttaagagattaatatatgagagtacattgcatttgttttacagtttgcaggtgctgcacagtctctgggtgctggagctattcttgtgaatccttggaacatcacagaagttgctgcctccattggacaagccctaaacatgacagctgaagaaagagagaaaagacatcgccataattttcatcatgtcaaaactcacactgctcaagaatgggctgaaacttttgtcaggtatggaaatcaaatcaattgtgtctcattgatttgttcaaatgaaaattatattatctgagaattccttaatgaaatgcaactcttaaaaaatctgcagtgaactaaatgacactgtaattgaggcgcaactacgaattagtaaagtcccaccagagcttccacagcatgatgcaattcaacggtattcaaagtccaacaacaggcttctaatcctggtaagttctatataatccatttatctaccgtatagagttatgttttgggagctgcctttaaagctttaatgatcttgtaactgtaaatacattcagggtttcaatgcaacattgactgaaccagtggataatcaagggagaagaggtgatcaaataaaggagatggatcttaatctacaccctgagcttaaagggcccttaaaggcattatgcagtgatccaagtacaaccatagttgttctgagcggaagcagcagaagtgttttggacaaagtatatatcatttctctctgtctgtttcctgattttcttttcttgttttaataattttctctgactgacttggttttacttaacgtagaactttggagagtatgacatgtggctggcagcagaaaatgggatgttcctaaggcttacgaatggagagtggatgactacaatgccagaacacttgaacatggaatgggttgatagcgtaaaggtaaaagtatattagcggttcaattaaaccgcatctcaaactcaataacttctttgctgaattctagttactcttcttgcagcatgttttcaagtacttcactgagagaactcccaggtcacactttgaaactcgcgatacttcgcttatttggaactacaaatatgcaggtacttgtctatctttttacctgattgttttcggccttttctgatcacgctgaaacactgaatatatcattcttccctgtagatatcgaattcgggagacttcaagcaagagatttgttacaacacttatggacaggtccaatctctaatgcatcagttgatgttgtccaaggaagccgctctgtggaagtccgtgcagttggtgtcacaaaggttgaaaaataaatcggctctagtcttttctgtctactctatatcaccttagcttctcacattcaggattctttttttccttagggagctgcaattgatcgtattctaggagagatagtgcatagcaagtcgatgactacaccaatcgattacgtcttgtgcattggtcatttcttggggaaggtgatataccacatctaattctttagtctcgagggattttgatacaaaatatctctgacattgttgttttcaggacgaagatgtttacactttcttcgaaccagaacttccatccgacatgccagccattgcacgatccagaccatcatctgacagtggagccaagtcatcatcaggagaccgaagaccaccttcaaagtcgacacataacaacaacaaaagtggatcaaaatcctcatcatcctctaactctaacaacaacaacaagtcctcacagagatctcttcagtcagagagaaaaagtggatccaaccatagcttaggaaactcaagacgtccttcaccagagaagatctcatggaatgtgcttgacctcaaaggagagaactacttctcttgcgctgtgggtcgtactcgcaccaatgctagatatctccttggctcacctgacgacgtcgtttgcttccttgagaagctcgctgacaccacttcctcaccttaatatcccgagacagtgtcaagtgagttcatgtaacccaataaaaactattgttttgtaacaaaaagcagccattaccagactctttagtggtttgattctaatataataagagtagagcaacttatgacacaaatgagaacaagctcttattacatataatattcgaactacaaatacaccccttaagcaaatctaatgaaagaaggggtaattaaacaataacaaaacaaaatacacgaaactgatattaaaggtgattatctaatgacgaatcacaatcattctcttcaggttttcttgtttggcccgtatgcatacttaatcagagactccttgatagagagtagctcagggaactctttcttgagcttggaagcatccatctcgttgttgcttcttggagccacaatgactttagcttgctcctctaatgtgaagtttgcccatttgaattcagggttgatgtagtctctgtacatctctaggatctcgttgtggctcaccacacctgggtttgtgaagttccagattcctttcaagtttcttttcgccatctcgatggagattggtaataactcgtccaacacagtcatgctgtttgggatgttcactactttgttgtacctggagatcttggtgatgaagttgcgcgggttgtttagatccgaggagatcggcatccttaccctcaatgtgcatacgttgtcatactcctttagcagctcctcgacctgtaacacattcgtaatgaagattagcatactaaaaaagaaggagatatcgataaagctagagtaacagagcaagaattagttataccatggctttggttttcgagtagaaagagccagtgaagttgggtgtgtcttcctccttgaagccaattcctgaaccttccggatgcttgtcgtcatattcgaatatacaaccagtagcgaaattcatcattaggagtccgtgctctctgcagacatcagctagagtcaatgtgccagctacattggcacggatagtctcggtcttgtgagactcacaccagtcaacattgggtctcccagtcacaccagcggaattgaaaacatgggttggcttaacactctgaatatcctgcagaagagaagatcgatcctccaaccgacctttcccatactcgtaagcaattccttgcttatcacatatctttccaagcagaccaccgatccatccggtctttccatatatcaggaacttcagcgaaggcttttgaggtgtgccgttgctcctttggcttggaacaaccatatgggtttgacttggtttttcagataaagtagctgccagcgaattgtcctcggagccatcaaagtgtcgcccaccaggcatcatcagcatccttggatgaggaagcaatgctccagaaacatcaccccaccactccgggttctgtgtgtaccaatccatagttttcttcaacccttcttcccacgtggttctctctgaccatcccaactttttgagcttctgatcgtcaaggaagtacctctgatcgttaaaaggtctgttgtcgacaaacttgatgttcgcctcagggtccatgttgaagagtttgcagatgtctttggcaacatcattcactctcctctccttcttcgtcccaatattgtaaacatggccaacttctcccttgtgaagaacaacttcaaaagcctcagcaacgtcttcacagtagaggtagctcctgacatttgatccatctccatgaatgggaagaacctgccctctcattgccagcaaaatgaacttaggaatcaacttctcaggaaactgattcggtccatagacgttattcccacgagtggtaataacaggcaaaccataagatctaccataagccataacaagcatctcagcaccagctttcgtggcagagtaaggattcgtcggaagcagctgagaagcctcatggttaccaacaagagcatcctcatcagtttcaccataaacttcatcagtactaacatgaataaacctcctaatctgaccagtaactttacaagcctcaagaaggacatgagttccatagatattattcttagtaaactcgaaactgttaccgaaggaattgtcgacgtgagtctgagcagcgaaatgcatgatggtgtcaataccttcagtgatgagaagatgattcaccaagtcagcactagcgatatcacctttgacaaacttgaagttcggagagtgcttagaaggattgagattcttgagatttgaacagtaatcaagcttgtcaagcacaacgattttgtaatcaggatagcttcgtatgagtctgttggcgacatgagacgcaatgaaaccagcagctccggtgatgagaatgttcttgggagtgtacgaagccatgatcaaacgctgcgtttaagaagaatgaaatcataaacactcaaatacgcagaaatgaatcagtagatctaggaaatcaaacgcataaaagcttagatccagatccgaaatctcgattctgtgattatgaccatcggatcaaagagagagagtacgaaagggtaaatgaaactcagtgaagcattatgatcaatgtaaaattcgagataatggagtataaaggaagacgagagattcaggaaacataccttcgaatttttcagatcttcaacgatcgcaagagaattggagaagacaattggaaaattccgaggaaaacgtgaagaattttcgacggtgacgaagctgaggaagtagcgaaagaaacggagaagaagaagaatcaaaattcaaaaaagagtcttctcgttcgtcacacagcaaaaatagaagaagaagagaacgaacactaaagactcctggagagggaagagtctacgggaattcattatatactgcttgcacttacgaaaatacccttctcgttttcactcttttacaatagcgggtaggtacacgacttgactcgcgtgttgatgatcgcgcgttttgtcaaacattaacttcgcatgtcagctaattactaacatgttatagtctaaaattagtctagatttgatttagaaaatggaattttataattataaaagactaaaaatgtgaatatgaagtatgaagtaacgattgtacgaaaaaaaaacaagaatagaaaatgattattgacgatttttaataaagtcaatgaagttaaaaacaaaattaggtaagtaaaacaagggacggttggctacagtgcgtttacgtttgcgattgtggtatacgtgttaggtaccatgtgtggctctcaacttctcaaacctttcatttacgatctagggtcattttcgtcattagatagcaatcgaatttgtatttgtaatgatattcttactatattttaataatagtcttttaatatgggatatgtaatcatttattgcacttgcccatatgcttaattagagatcaccgacacattccattattgtcacttgtgatcttgtgagagtgaatgattaactaaaatatttgtaattgatttgattttcctaatttctttgatcattaacatctaaagacgccttggatgatttgtgtgaaaaatagtttaacgggggtagagtagagaaacaaatttaattcagggaccattttagcaaacaacgtgtttaattgacaaaaggcacgtgagaccacgtgagtacttgttttggtttcttcttcatcggtccgatcagagagagagaatcgccggtgagaaaagaaaatggcgtcggcgatttctctttctctcttaaacggagcaacgcctttgaaatcgaattcgctccacaaatctagactcactccacttcatcttcgaactatctcttgttctagactatcttactctccctcgagtcgcgaaatttctctcaaaactcaatctactgttcctatttcgtgtaggcgtagtaggtttgacttcgttcctcgttgcggcatttcgtcgaacgatttgcctactgagaaaaagaagagctttggggagtgggttgagtttgtgggagaggcggtttcgacggcgtttccgatatgggtttctctgggatgcttgttgggactgatgagaccaagtactttcaattgggttactccaaattggaccattgtaggtcttacgatcactatgcttggaatgggaatgactttgacccttgatgatcttcgtggcgctttatcgatgcccaaggagctcttcgctggctttctgttgcagtattcggttggtttgcttctcaatgctctatctttagtgttcgattgttacgaattatgcacaagttagaagagaaatcgagaaagatgagatcttgaaggaaccggtatagatgatctgataataggtttgtttggtttggtaacataatcttgtggagtagttagagttattgcttgagctcatgattcctgttttatgatcttaccaaattatagttttgaaagagtagtattagagcatggataagttcatagcttgctgatgaatagtgttgcaggtcatgccactatcagcattttttgtgagtaaactcttaaatttgccaccacattacgcagccggtctcatattggttggttgctgtccaggcggtaaaatacaattctttacttgattgcattatattaacacttgtatggtgctctgatgcttttccgtttgttgtttgaaggcacggctagtaatattgtcacatacatcgcgcggtttgtaatccaaacaaaaagaaacgacttttgagttccataatacaactggatgatctgagtttcttttttttcattgtacagtggaaatgttgcgctatcagtgttgatgacagcagctagcactgtttcagctgtggtaagttactagattatgacattggtttttctattcttcttgtagataaagacaccccatttaatccattccgttttctagattatgacaccgcttcttacggcgaagcttgccaagcagtatatcacagttgatgctcttggattactaatgtcaacactacaggtttggttggttcagtctgtttcttattcggattagaacgagcgagtttttgttcattgactttacccttcttggctcctgtttgtgtgtggtcacaggtggttcttctcccagtgttggctggtgcatttcttaaccaatactttaaaaagctggtgaaattcgtctctcctgtgatgcctccaattgcggttggaacagttgcaatcctgtgtgggtatgctatcggtcagaacgcatctgcaatactcatgtctgggaaacaagtagtcttggcttcatgccttcttcacatctctggatttctctttgggtatctgttttcaagaatactcggaattgatgtggcatcatcgagaactatctctatcgaagttggcatgcaggtaactaaacagtatcttaaatgaaacggtaaccagagctattgaaaactcaatgtcaactgaggctttttttcttttcattttgtattggtgaagaactcggtgcttggagttgttcttgcgacacagcattttgggaatccactcactgcagtaccgtgcgctgtttctagcgtctgtcactcaatcctcggtagcgtcttggctggaatttggagacgcagtgccccaaaacagcttgaagactaaaaagaaagcaaaggaaagttcatgaagtcctcactgtgttactcaatttcaacatctttcaggaccatttagttaagtttgttgaacaaatgaaccaaaacgggttatgtcttgtaaagctttggaagatttttttttttttttctatgtctgagatttctcttgttattcttcaaagaattttgtgaattcgaaacatgaaaatcatattttgttcatcgtgaatcaagtgatgaggttgaaaaggctaatatgtaatttctaacatttgtggagggtagttttggggttttcaattaggaacagctagtcttggtcgcagaggataaaagacgttttaagtcgtcttctccaaatcgattttctttcacctttctctctgatttcaatttcaatttttgttcgtttttttcttccggaaaattggttgttgggtggatcaaagcttacgagatttgtacttttgttctggtgctacaagtccaatggaggcggaaggagaaaaacagtggagttctctcatagtaccttttgttctagagatagtgaaagagaagaacttcacaactattcctccgaggtatgttcgggttgatcaagaaaaaactgagatcttaaatgattctagtcttagttctgagattccagtcatcgacatgacacggttgtgttctgtttccgccatggattccgagctcaagaagctggatttcgcttgccaagattggggattttttcaagttagtctctttacacaccttgaatctttgtgtttctcgtaaaacgtgacttctgtttttgaaaatgctctcttgctggttacagttggtaaaccatggaatagactcgtctttcttggaaaaactagagacagaagttcaagaattcttcaatctccctatgaaagagaagcagaagttgtggcagagaagtggtgaatttgaaggatttggacaagtgaacattgtctcggagaatcagaaactcgattggggagacatgtttatcctcaccactgaaccaattcgatcacgtaaatctcacttgttctccaaattacctcctcctttcaggtacgagtcttgttgtagttgtgtgattacgaattagtctctaacaactgtaaactgaaaaatccgtttttgttttcagagaaactttagagacttactcctctgaagtgaagagcatagctaagattctgtttgcgaaaatggcgagtgttctagagatcaaacacgaagaaatggaagatttgtttgatgatgtttggcaatctatcaagattaattactacccgccatgtccacagccagatcaagttatgggtttgactcaacattcagacgctgcaggtctcacaatactcttacaggtgaatcaagtggaaggacttcagatcaagaaagacggcaagtgggttgtcgtaaaacctcttcgagatgctttagttgttaatgttggcgaaatcttagaggtaagagagattactagaaacctcttcccatttctatgaagaagtttttgctactgcattcttctgatgtgagtgttttgtttgctattgtaaagatcataacaaacgggagatatcgaagcatcgagcatagagcggtggtgaattcagagaaagagaggttatcggttgcgatgtttcatagtcccggaaaggagacaatcattcgtcctgcgaaaagccttgtagataggcagaagcaatgtttgttcaaaagtatgagcacacaagagtactttgatgccttctttactcaaaaactcaatgggaaatctcaccttgatcttatgcgtatttaaggaaaaagactctcataaaacatgtttcttcgtaattttgtaattaagagaaatctttcatcttgcttcttgtcattaaagacattaatacacacgctttaattaaggcagttaatgaagaaaagtaagaagaacaaaaagaggtgtagggattggctgactattgggcttttctatggacgcgaagcagcagattatagcactcctctctccccacaaaacacaactcagtaaaccaccggaagacgatacgaaccgttatattaacagccgtcgacgaagttcacaagacgcgacgccggagagaaaaagtcgagggatcaacactttcgacgatttttcatttctctttttaactaatcgataggtctgtagttgtaaccagcaaaaaaagagagggttttcttggtttataagggtttcgtatacaaagtcgagtttttttggggtgaagtaatggcgagtgcagctacaattgagacggagaaatactccttattagaagattttaatgttgatgttgaagtagacgatgaagaatacgaaagtttctccctttgtttctgggtttatcttcttaattccaccacattcccatctaccatcattagacaggtgattttccccagaatccaatcaaagcttctttttattgtttctcatggtgtttgctgaaatgttccttctttattcatcggacttggtttgtttctctcttagttctgtaacttgtttgattctcctatagtcctgtgtactaaatttacaaactttttgactttggtgtgatttatcgtcctcgattgtttgtatctgtgacaaagaaatgaaatttgagttggttgtgaggtattcgagtaaagttttgaaagcccagttctctgttttattgtttatatagagatttagttggaaataggattggttcactttgttctttatctctgatttaatgtagatgttgttgaattaggatttttcgccagagttttcaatctcttgtataagcaagtagttccatgatcaagtggtttgtctttaacaggttcactcagacatgagtgttagtgcacctttccttgtgctagatgaaaacaagaagatgatgcttttgccattgactctccttcacaaggaagctcctgatcctgtagacacttcttcctggacacaagttcctagcgtttctacaaaatccaagtttcctcttgaaaaatgggttcatgtgggttgtgaggtacggtttcctctattttctcaggaaaatgcaagatcctatgtttccattttcagatggctgattctgctgtttttctcaggtttctagaaattttatgaggctttttattgatggaaatatggaaggagagcagttcgtgacttctttgctgacaaagaacgcctatcccgagtgtcctcgaaagatatcgctatttagtgttggcggagatggttatagcgtacaaggtttcatccaatgtgcagaagtcttacctgctagtgatcacgtggagcatcattatatgaaggtcttctgcttagtgcttaactcttgcccttattttcctttaaaacagtcttgttctgtgcttgtttatttccattattcttaaggtttcttttctattttttccaggacccacctctaatgttatctgtcaataaatcatcctcatcggggatcaaattagatgattgtggtgtttggcaggtcaaactttctatagctcattagaaattttcctagcatcgatttacatttccgcagtcaacacttattttcttgctctataggcatcttgcaaggagatgttttccttggatgttcttttatccaatgccattggccagcctgtgcacaaggatgtggaggttcatttctcttacaatttctcatcacttttggcactaagttgcctgcttttttagtttggaaaatcattgattacatggttgggtttaaaatgcaaggttgttgcatcactactgtatgccgatacacttccggaggccaagatgggtgaagctgaggctcctcttttgataagagatgaaggagttcaattctcatctgatgatagaccgatcaaactattaaatggacgctcatcctttaagctaaagatctctcaggtaaaaataacattgttactatattatttatctttgtattgcttctctccgaccactttttgtggaaaagtctgaccatttaggttacaattttttcgctttttctgaaatctgtaaagaattgttgttaaatatttgtttccagctttcctccaatagtgatgacagattgttctggattaaatttggaatacgaaatgctaaagattatcctttccttcaagctgtttccaatccaatccgttgcatttcggtcagtcctgaagtccagccagtttcagttactccgaaaaggttgaccaatattgaccatctatcaagtaccgaatccccggatcttctacagaacacttcgtcagttaaacgaatcaggttgggaaaagaaagtgtttctggaagcgaggaatcatatcaacaatgcaactctcatcctcaaacctcgagacaggtatatagtgaatcacttttttataaaaattttggttacatatcttataacttttaccgtttctgcattgtttgctgtgagaagtttgagaacggaaatggcatgagattgcacgaagaagataactcctcaattgattcagagaactcggaaatgagatacacaatctcagattccaccatctttaagtactgccttggaaacttaatcgacaaagctctacttctaaaggaaatcacaaacaactcatcagacgatgaagttttggaatttgcaaatcaggtttctctgtactctggatgttcacaccataggtaatttgaacctaacggtcatatgcttaccagagaagaaaactaagaaagaatctttattgtgatatactgatattgtgaaatgaagtttgttttttcttcgaaatttcagctatcaaatcaacatggcaagagagctaatagcagaaggaacaaatgcatggatattgatatctcggaacaatcaacatgttcattgggataatgtggtctatgagattgaagaacatttcatgaggatttcaaaatgcagcagtagatctctcacccaccaggattttgagcttctaaggagaatatcaggatgctacgagtacataactcaggagaattttgagaaaatgtggtgttggttgttccctgttgcttactccatatcccggggcttgataaacggaatgtggcgttcttcatcgcctaaatggattgaaggattcatcaccaaggaagaagctgaacattcgcttcaaggccaagaaccaggaaccttcatactacgtttccctatttcaagaacttggcctcaccctgatgctggtagtttggttgtgacttatgtcggtcatgatttcgctcttcatcataagcaactcaagatcgataacatctgcgagtagacttctctctattttatcctcatccctaaacaaaatcgtcttgtttcatgaaatgtctgattcaaataacatttattatctgcagaagtagtgaaaggtacatggatgcaaaaccgctgcaggatatgttgttggctgaacctgagctctctcggttaggaaggtgagaatggttctttgttgtgttagaccaaaatataaaaccgaatttcgagactgagaaacgttgttttactttggatttttgtttgtgcaggatcaaaagaagccactgaatgttatgcattttccaatatacagacactaaatctctcttacagttagtaaattttgtataagctaagagggcttagctaaatcagtctcaaattaatgtaaaaatcacaatttgcaaggattttttgaataattgttcatcttcttttagatgttgaggctcaaaagttgtaaaatcttgcaatattactgatcttcttatacatgttgagtataaagtcaacgacaaaaactaggtagtagctggtaagatacccacttcacgagttcttttattacaattttttcataaagtgttacttctccatttaataatttcaacaaaaagcggatgaatttttatgtataaactcatttttcatttcatacgtaataataatatatgaactgttttcttatgtggcctgtccaattgttggtgaggatgaaaaaaagttgtaaacctactttctttttctatctatctccgttttcacgtaaccaacttctttgtcttctcttctttttcaaatcaagataatgaaataaggaaacaaaagtttacaagttttcagaaaaacaatggctaatgcaaaggaaacaacgttttatataacaatctctgtggttgcttttgtcattggcaaaatcgtaatcgctcttcttttctacaagagatggaagagaaagcacacaattcatgaaaatggatttccaggtattaaactagctttatctatgctactatgtgaaataatcatttctctaatgttttaattttgtgttttacaattttgcagtcaaaggaggaggaaaaatggtgatgtttagatctcaattacttaactctgtttcctccgacatgtttatgaagaagacacataaactaagcaacaaagacattcttggttctggaggatttggaactgtgtacagattagtcattgatgattcaactacttttgctgtgaagaggctaaacagaggaacttctgagagagacagagggtttcatagagagttagaagcaatggctgatataaaacacagaaacattgtaactcttcatggctactttacttctccacattacaatcttctcatctatgagctcatgcctaatgggagcttggattcttttctacacggtacacataaaacagagcattaagcacaaaacgtgtatttgagtggtttctttagccacaagttttttttgttatttgcaggaagaaaagctttggattgggcgtcgagatatagaatcgcagtaggagcggctagagggatttcgtaccttcaccatgattgcattcctcacattatccatagagacatcaaatctagcaacatacttcttgatcacaacatggaagctagggtttctgatttcggtttagccactttgatggagccagacaagactcatgtttcgacttttgtggctggaacattcggatatttagctcctggttggtacacaactgatagattcaaatatataaaccaaaatttggattgcatttcgattttgttcatgtttgtttttgttataaacagagtatttcgatactggaaaagcgacaatgaaaggagatgtttacagtttcggagttgttctgttggagcttttaactggaagaaaaccaacagatgacgagtttttcgaagaaggaacaaagcttgttacttgggtataaagttatctatctattttccttgtataagttattaatcttgtttggtttcaagcgacgtcgttgtggtgtgtaattgtatacaggttaaaggagtggtaagagaccaaagagaagaggtggtgatagataaccgattaagaggatcatcggttcaagagaatgaagagatgaacgatgtgtttggtatagcgatgatgtgtcttgaacccgaaccagcaattagaccagccatgactgaggttgtcaaattgctcgaatacatcaaactttccacacgttcctctttttgatgtttctcttgtcaagaaaaataatcaaattcagttccaaaataaagttttgctgaagaaaaagatttcgagatctgcttctttgaaaagctaaattgtaatttaatactccatattagtatagtaaagattatttataattgatttgttttagtatggaataaaggattattacacacaaaaaagccttatatcaactattcttttttaagattctcgtacaaagtgggcattggatctttaatttttccctaatttacagctcagctcacgttttgatgtcttgttatttgatcccaaatgttctcactactacattaaaccttttgaagcaattagcaaccttttttttttgttacttagcaaaaccaaaccaaacattacgtttatataacgacacttttgctaaaacggttacttttcctagaagcaatttgctggattattcacctcaaaatcctaaaaacattaattagcattagatatctaaaaaaagtgaaatacaaatctttgtttctttttaaattgttttattttataaaattgattcacttgctcatcatttatatacaccaaagagtgtagaagagttctctcactcaaacaaaaatcaaacaatggctaaagcatggatctgcctttccttcctcatcttcctctaccttgtctcaggtatataaattaccagtttaccactaatcagccatcctagtttaattaatttaataatcctaattaacagtatcatcctcatgttctttccttttaacagaacgaaacttcatcaacgtcaacgcagaggtatttgcttagaccaactatcaaattgctatctgatttttttttcttactcaatgagtttttgttctaagttgttgttatagaccaagacttggtgtgtggctaaaccttcttccgatcaagtagcacttcaagataacataaacttcgcatgttctcatgttgattgtcgtgttcttttgagtggatgtccatgttactcccctagtaacctcatcaaccatgcatctatcgccatgaatctttattaccaagccaatggaagaaactattggaactgcaatttcaagaactccggactcattaccataactaatccgagtgagtttgctctttctctttaattatgctatcgaaaaacacttctctatctatatatagagagaagtggttttaaaggtaatttcatttttacctttaagtatctggttaattatattaaaggtaatttcattttttctatatgtgtaggctatggaaactgctactatgaataaacatgagcaagaaaggaaaaaaaaaaaccatatttcttacaagcaaacagaagaggaatgtgttttcttgttgttgcaatgtttatgagttataatttaaatttccaaagttcgcagattttgattaatcaaatttgataacataaaagcaaaaaagaaagtatccaacacttatcaaaatttgatcacaattattccatctcattttcagtaatgacccttattacgtactgaccgtaaacatagaacttaccgtaattaagcttttaaaattgaattcttcaccacatgaacatttggaaatatgtagaacaacgtaacgttttcttttcttttttctttggtgtcagaaactaacgcatttctaaagattttttttttttataaaggtaacgtatttcgatatactcgaatgttagtatgttaaaccattggataaatgacacgtggtgaaatcttagcctcaagattagataagcgtagactaatcaatcgtttccctcttctccttggtattgaacaaaaacacagtcgtcactttcgtgcctcccgaatgatctcatgtgggcttgtctcgtccacccaacaaactatagaaaaaaaactcgatcggctgatacttaatcacccacttgattttgtatttttgtacctttttttgttgtaatttttccatacacccaatttcccgtggaagaaaaggagtcagctttttcgtttgctttaaagcttgaatctttacatagttccagttactttctatagagcttcataatccctagttgcccaaaaggattctgggttttgtgagaatgatgacgtcatgtcggaatatagatttaggtacgatgatgatggcatgtggttgtggccgtcgtcagtttccttcattagcgaagactgtttgtaagtttactagcagcaatagaagctatggcggtctggtggggagttgcaaagcggtgccaacgaaatcaaaggagatctctttgctcaatggtatgtatgattctcacttaaagtcttaaactttttgttttatgtgattagatatttgatttagtttttaagtgttcgtgaaccttgttctacaatagttacagatttttaagaatcactggagtttatgcttattgcctcatgagaattgtaggtattggtcaatctcaaacagtgagttttgatttgaaacaagagtcaaaacagcctatttcgttggtgactctgtttgagctagtagctgttgatctgcagactttgaatgacaatcttttatcggttagtgtttcttataaactctttctggcactgtctttgtctatcctgtgtttgaagtttcactaggggatctaacaaagtggttctttatagattgttggtgcggaaaatccggttttgatatctgcggctgagcagattttcggagctggtggtaaaagaatgagaccgggtttggtattccttgtatcacatgccacggcggaattagcaggcctaaagtgagtagtctaaagactttactttattttgttggtattcctttcattcagttgggtatccatcttttatcacaaaatgatcatattcagatgtcttgatgcagggaactaacaacagaacaccggcgtttggctgagatcatcgagatgatacacactgcaagcttgatacacgacgatgtgttagacgagagtgacatgcgaagaggtgagttttgttaatagttatgagattcatctatttttgtcataaaattgtttggtttggtttaaactctgtgtataattgcaggaaaggaaacagttcatgagcttttcggcacaagagtagcggtgctagctggagatttcatgtttgctcaagcgtcatggtacttagcaaatctcgagaatcttgaagttattaagctcatcagtcaggtacttagttactcttacattgtttttctatgaggttgagctatgaatctcatttcgttgaataatgctgtgcctcaaactttttttcatgttttcaggtgatcaaagactttgcaagcggagagataaagcaggcgtccagcttatttgactgcgacaccaagctcgacgagtacttactcaaaagtttctacaagacagcctctttagtggctgcgagcaccaaaggagctgccattttcagcagagttgagcctgatgtgacagaacaaatgtacgagtttgggaagaatctcggtctctctttccagatagttgatgatattttggatttcactcagtcgacagagcagctcgggaagccagcagggagtgatttggctaaaggtaacttaacagcacctgtgattttcgctctggagagggagccaaggctaagagagatcattgagtcagagttttgtgaggcgggttctctggaagaagcgattgaagcggtgacaaaaggtggggggattaagagagcacaagaattggctagggagaaagctgatgacgctataaagaatctacagtgtctacctcgaagtggcttcaggtcggctctagaagatatggtgttgtataacctcgaaagaattgattagctttccaaaagaagttggaaacactgagacatgcttatagacttatagtacagtaaaacacacacaaaagaggaatgattgtaactcctatttcaaaagtaataacacatgatttcgatttttggaaagatcttttgactgataatcagcaattagcagaaaatgacaagtgttgaagtcattactacagtagcaagagtgtttcatagaataagctttggatgcgaagtcttcaacagaggggcacgcgcagcgcctttgtgtagtatgtgagtgcccaaagagtgaaaatgtttctataggttgcataatggaccatcacgttcatcttgaacactcccattatttcctgcattttgtggtatatagagttatcttgtatcagattgaagcgcaagttggagaaagaaaaatgacaattacctcttgcggaaaatcgccattatccaactgagaattgatcaacactttagctgcgcgatgaacaggcaaagggtctctctccatctgaccacccataataagaaccatcaatgcttgtccagtattcaccacattggttctgtttccctctagaagtgtatatttcttgttggggcaagagagataactctcaccccaaccgccttcaacgttttgtgtctccagaatgaactgaaccgctttacgaatcggctcacagttctggtacgtcttgcctgcagccactagaccccttaccgcgaaaaaggttccatacatgaaacacacaccccagtttccgtaccacgaaccatcgggcatttgaaagctttctatgtatttgacagcattcttgataaacttttcaacctcttcccttctgtgctccggaaactccttcaagaaccgagccaatgccactatcgctgaccccgtacattctacatacctaaacaaagctccatatattccatagtataaatcattcatttttcaaaagaaaagaaaacaaaaaaattgatgtggtaaagatagtactcatgctcgacgattgtgtcttccataaactccactggactaagccactgaaatttattttgagccattagtattacactaaaaaacacaaactagtaagacaaattaaaataactacctctaaccatgttcttccacgagctgcctcccacactgttatacctccatttttgctctgttaaaattttgtaacaaattaatatcactaatcactagccgttgtggagttttggttataaaattataatacctgaaaatagagaagtaaattaacggcatcatagagcctctctacatccattttctcgccaatcaactccgatggcatgcttccaaagacaaggcaacactggccagccaagtgtaaaccgcgtttaatcctcaaatgttagttgattgatggtaaaagggtactttaattaaaaaactaataaccattggagtcagaacctctaaactctcagcagtacaatccgaaacaggccatccttggtcttggtccgaaaatgtccatcctcctttcgcaatgtctttcaacatttttctatggtcaccaggaggattttgtgtaagctgagatttattcaagaaactgtatcctttgattaacgttgatctaatctcatcatcatcgtcatcaacatcttgataagctaacatgacttgaagtgagaatgctgtatcccacagttggctaccaaaagactgcaccaaatgacattctctaatttaaaaactcaacattttcaaaacagagtaaaaaatatatatactctttagtttatgactaacttggattttcagaccatcctccccaatccatatgtaatccgggactcgagcaagatgtttcttaaaataatcaccgtcggggtcttctacccaacaagcaagcatatgaaacggctatatatcaaaaatcaaagaacagtgttatagtactagttatgatttgtactaatacggtatattgaggaaattttaccttaggcacacatccaccggtaaagtaacggctggcttcatcttgataatgaagaagttccattgtggttcgaagagctttttgcctgataagcttgttgcaaggccatcgattcaggatattctctgacaatatatgaacacatttccaaaacatttcttgtaaaaatgactgtggatagtagagatcttcctgcatcatgtcatttattattattattatgtgatacttcattggtctcatgtacttttcaactttttacctttgcgcactgattgcgagcttgactccataagattttgtcataaggttgaggataaagctcttcccgaagctgtaaaatgagaggtgttggtgtagctacaaatttcttaccatacaagtatgacactcccataaaaatgtcccggaaataaatccatagagtacctgttaacaaacatgttgattagagacatgcttggaccgatcatatatatactccagtaagcaaatataacaaaaccataacaatttatagaatagaatgtggaagtggaacctccgttgaagggcgaaaaagtagggagcatccacacctcaggcggtattggtttgcaacctgaccaatcatacactccaagaatctgattggcacaaaacaatccatgatacaactgaaaaaaaaaactcctcgaaaataataagactatttttttttcaataaaataagtattccgccatgcataataccgataaccaagcttttccgatcaagggcgtataagtagcaccaccgtgatcgaggatccacttacgagcccttgcacaaccacttcctttaatatcatcaagatctgcttctactcccagaatccgtaggcaaatgtagttgatgactgtgcagaacatagcgctttggccttccacgtgtattccccacccaccatcttcgttctataaaccaaaataattatcctcgtagttaacgtcagaaaactatcatagtaaagatcagagaggggcttatcactaaaaagaagctatatgtgatcaaatgtgttacataataagttcacctgatggttgtacatgtaacgcaatagttctttgcgatgttccaaagtcaagattttctccaaatgtccagtgatgtacaagcatatgacctaaaagtaccatatcattacactttacatatatatttaatgaatagaaaacaaaagaatagtatagtattagtagagagagtgaagaatagctcacaaagggagcttcgaagaacaagcaaccagagttttcagcaggccaatgtccatcctcagcttgcaatgccttgaaatagagtatccctcttctcagtgccgtctttgcgtctttgtacgttatattttccgcatctcctatctccactctcggaatcttctgctcgaacttcttctccctcaggaactattaaaatccatccaaacacacaaacttatattcaaccaaatgcaagttttactgctgcaactaactaacatggtagtgtctcccaagagatcaagtcccgaactttctcattatcatcatgcatgttaaaattaaagcttacctgcattcgccaaaggagatcagcactgatcttgaaacgtgatcggtttatggagaaattctgacgagcttcatcgacctcagcgagttcctctggagagcatgcatcggcatcaaactcccaagtctgccttccggtgtagttgttggtggtgaataagtgagtctcatctccgcccttagccccgatcttcagcctccacattttgtatcaaaccttttagaaagtcaacaagaacatgcatgtaaaacattggagcacgtataaataatgccatcatattgtgtaaggtttctgaacgcaagctcacactgagaaagatgacacctagcatccctcttctaatatgtgtctttcctctcaaacttctattaaattttattatatattaaaaaaatatcttgaaactatcaaggagatacatttttgcttctatcattctttttttgaaagagataacattaaatcttatataataaataaaataaaattcaattaaactaatagaagtgccttttctttgtgacatgtgccttttctctcaaactttcattagatttcattatggtattatgattaaaaaaaaaaaaatcttaaacaaatatctatgggacatactttgttttcatcatatcggaaaggcataacattaagctagacataatttttgtctatttttctacttattttcattaaattttaaaattaacatctaacaaaatttataataaattaaatattctctttcctaaaaaaagtcatatataataataataaaagttatttaaatccatcaaataaagtaataaatagtgactaaatccatcaaataaagtaataaatagtgactaaatccatcaaatccctatgtccaaacgtaaatctatatggagtaatgtttttattgttttcaaaacgtttgggtatatgtgcgcacttgaccataaattagtccattaatgcgatttgcaataactcataaatttagcggaaaaaaaatattaccagttttattttatttttgacagcaaaagtataaattaccaattgatatggcttcttcatccatatttttcgacttatttcacaatatttatttatttattcatttattattatttcagattaaattccttcatctatgtacgtgatgtagttgggagtatagaactaacggagcaattagtacaaaaaaaaatatgaatcattggagtgacttttaagtcatcagtacagaaacagccgcaaagagtacatagaattaggaacccatgcatgtgatcagattcaagacatatataaacaaagtttaactcatttgacaagatagatactttttaaaaattatagagatcgcatattacatataaaaagactccagagattttgcggaagcaggaaatgagattattgcatataatgatctgattattaagatttggaaactgcatgcatggttcacttggtaggagactgagagatgtttataagcagatccttggtgtattgatggaatggtgaacgaatgatctcggagtcttggaccattgagaaatcgtaatatgccacaagatgatggaggaagattgccatttgaagccgtgaaaactctgcacctacacaaagtctaactccatatccaaacgccatgaacgttttagatccccaaatcatttctttcccctgccacaaccaaccaaatcccatctataggtttacaaaggatgatggagaaagagaaaaaatagagcagctgaaaattatagtaagtgtatcactaagacctcccatctccatggattaaactcaaatgggttctcatagattgcaggatcaaaatgaaccgctgaaggtgcaaccgccacaatccaaccagccggaattgtatatcctgcccaggattaaagtttcttctagtgattcagagaatatttttatacatacatgtataacttccaagtagtacttgcctttgatctcaacatcttgcaccgcctttcgaaacaacaaaggggtcgtgtttgctaggcgaagcacctcattgctaacctatagattaatgtcatatcttccacttgtaaatatctcatacaaatatgtatatatatagatgggggtatttaatctaccatgttggtgaaagtcatgttgtgtctatattcttcccagctaactccagcttccttatcttttctgttgtctacaattgccttatgctcacgctgtgccacaatatatatgactctatcaaatccatccacacttgttcttaaagacgatagccatatatacatgtttctttatatattaccttgagctctgcaagcactttcgggtctttggatatgaacttcacggccaaagcagtacaactagaggtaccttctctcaaggcaaacgccagaaggaagatgagatttatagccgatccttggtcgaaaaagctaccgtctttctccagttcttctagaagcgtgttaaggaagtcttcttgcttctctcgcgtctcttttctcatcatgagaacgtctttcatcacctggatagcttcttcgcgtgactgaatacaacaagcaattagttgagaaaacatgtgctacttattattactaaatataaaaagttccaaaaaactaaaaaggaaatgttttaagtcaccttgagggctttggtgacagctttccaagtagagagtcttaagaaggacttaaaccaatcaagattgaaggcgttgagattatctataagctttgattgcgtctctggtttaaggttacttatcagctttggtgtcatgtacgctactaccaactgcaatattaaggaagattttcttggtacgagctgaaattggtaaagacaaaaatgaagatgtgtaaacttacgttttcaacttctttacgaacattgaagctcccctggctagcaatggacctaatatggtcgcgggttgctttgtccatgtttcctaacattgtttgcttcaaaccctcggagccaagaatttgcatagtgattttttggaggtacttgtggatgaacacttccttcaagaacaaattatcttttccaaatactttcacaaatatgtctggatagcctagctcaaaagacgtgttctcttgccggaaaatctggtggatcacatccggatctgtcgaaaccacggttttggaaccaaaaatgtttgttcgaaacaacggcccatacctagaaagattcatacaaacacaaaacttaccatatatatacaaaatctcttcccgtacgttacatattattgaaatctaaccttatcatcctcttcttaacaaaggttgggataccttcgactccacaaggcttaaagaaatcgagagtctctccaatgattggaaaacccatcgatccaggtggtaacttgccagggcacttagggtttgaccatcggtaaagccagtggctgatcctcacaaccaccaaagctaccatcaacattgcaacgttccatatggagctcatcgtgctgcctctcaagtgttgaccacagctacaactcttctcgatgttttttacttttttaactcttatcaaggttaattgaagaaattaatatatgtggatgttatagtgttgtagagattaagtactaaattttcagtcacgttttaattgttctagtatatagcaagttctagattaataagctacattaattaatagttttttctcttgcacaccatgcatgacactatatctcccaatattttttccttttattagtatacttgtccgggtcagatttttgagatcttttggctgtgaccagtctagggagtgtgaatattaaaaatttatgatgatgaagagttggaaagcatatgaaaagtaagaaaatcactgatgattcaccaatcctcttacacatatataattgtcaaaaactaaaatgatgaaaagttggaaatcaacaaattttgtaagagatagacgaaacatataaaagaaaacaagattcacaataatacgtcaatcatcaacagaaaaaaaatcatcgtcgccatttacatatatcaaagtaccataagttgtgtggttataaatcacaatccccaagcaatcgcatgtgacaaacaagaaacaggaccgacagaagctgtcatatattgtcacatgtcaggcacccaatatcttcaatttccctgaatatcgtcttacattgatgatatatttttatgtgaacttttaacgggaaaactactataaaaaaaatttgaattctttccaagtgttcaaataacaccttttcttgtttgtttgagaaatccgtatattccttataaaactaaaataagttataaaaaaaaaaaagttttaaaagaatttgattgtaaatttgacattatagatcgatgtgatagtcgaaaccaacgaaataaaataaaccaaaccgagttacctatttaaacttgcatcatattaaaccaaaaataataataaaccctaaccattagcaaacaaaattgaaagccaaagagggtcaataaatattgtcttccttatctcaaatcgaccaactcgtccttgaaggatccactaatgtgtctcctcgatattttatattattggtatgcatcaaagacgagtttgtctactgtttagaataaattatagcattatagaaaatgggggaaaatatttttttcaatctcgactatttagagaatgtgtttttcaatcggtataaacgagaaatgttgatttatacctaaacatgtaaaattttcaaaaaacctacctaaactgttgacgtattgcgtaattatgagttaacgttaacaaatgttagtcaattctaacgattgttgagtcaaatgatacatgtgtattgacgtggtatattcttcaactaaaccaacgttattttgctattttgaattcaatttttgctaattttaaaaaagaaaattaaattcaaaataactaaacggcatcgatttagttaaaaaatatgtcacgttaatattcatgagtcatatgactcagtaatcattagcattgactaatatttatattaacttataactatgtactatatcaaaaattcaaatagattttttgaaaattttcggtgtttaaatataaattagcactcgtaaaagacgcatttttttaatagttgagattaaatttttatttcagcaataattaaaaagctttttagaaaagccttcttcataaacagtaatgtctttgactatcatcaattatttttttatttttgtcggcaactatcatcaattatttgacaccacctttgattggtacatgaacgaaaagctctctttattttttgattggcatcttttagggtaataatgtatcattttaatttttaaggggaaaaaaaaaaaatgtattatttaataattttaaggaattcttcgtaatgtaaagaaaaaacaattattcaaatgaagctttttaatttcgggccgtaaaagttaatgggccatgtgcaattactcacaccatgtttttattcctttccctttttttctttttttcttctttttttccttttcaacgcgaagaatgtttttattttgatctcagttgatttgactgtaggcacagtttttgaattggaggcaaaagtggagcaagtgatcccgccggtgaaggttgaagacggcgaaagcacaactcatgaaacgcgacggatgcgttacggagaggagtttctttcttctcgactttgcaggcctccgatggtcactggcctggagaaatcactggacctctcttcttccttcctccattggtatgtttcttcttcgttttcctttcgattcttactttacgtctatcggcgaatactcttagggttagaattagagatttaggtttctattgcgcgagaaattataagaaattgaagggataatgaagaggaatcaatgaaacggagagaattttcctgcatgtattttttttctgtatatcacagattcataggacatctcgaggagatatttgatgctgagcatcgtgaagagattcttcgatatatctatcgtcaccttgtattcttgcagcagattttaaagaagaagcttgaccagagaagatcctcacatgagttctgtttttctcccttaatttgcagaacgatgatggtggatgggggttacatgttgaaggcaagagctttatgttctgcaccgcactgaattacatatgcttgcgtatactcagagaaggtcctgatgaaggacgagaatatgcgtgtaaactgacgagtaagatgccttggatcgtgacatttttgctcatctacaacaatgaaagttgtttcccatcaatctagttcttccaactaatcttgaacctcgtgccacttttttttgcttcattttctttgttttcgcttaaatcatctaaacattgcccccacacttatcaacacatgttgccccttcacctatctatgaaagagattaagagaagatgtcgaaatagtatttccagaggagtggtgcagcgtttcttaaagatgttgatggtgaatacaaacgaagcagcttgtttgttgacatcggtctagctcaaaccatacatatttgcaaagatgttttggtttgaactagaccgagtacaacaaacaaactcctccgtttgttttcacgatcaccatctgtaagagtaccatctacgtccaaagatgttgcctctagaaagcctattttggcatcttttcttgcaaagatatgtgaaagagaaacgtgtgtccataagtgtagcaatattttcaaatattcagatgattcaagcgaataaaaaaaaggaatcaaaataaatggcatgcggaaatctcaaccatcaatgtcacaatccggtgcattttactaatcagtctgagaaacatgatcgcgtctttaacctgggaaaagtaaatctcttccacaaatgaagtttcatcccaaggaagtaaaggtgttgaaaatccttcgacatttgcttctctagttctatcttttcgccaagtcagtagcagattcaaattaatatattagtgtctgctaaattatgattgggattttacagtaaagttatatggatttgtatactatacaagtcaagttaggattgtccttttttgagaagcataccaaattgtaatccaacaaattctatttaagatagatcataagttggtgtacctttatgtatgcaggtatttaatctaagtggcaagaggtcatatcttctagatcttttatccactacaatagttaacaaaaaaaaattcaatcttttaaatctatcagtttcaaaatctaccgttagacttaacggtatttcgcaagaaaatagtagattttatattttatgagcaaggtttgaaattattataagagcatatttttcttgttgttgtgaatttgtgatgtataaaaatctagaaattgcatttcaatcaacaaacaagataatttcaataaatatggatacgctatcttagggttttgtaatagatcatcatgttagttaaaatattatagatctattcgtgtaaattctttatccaaaaagcactaacagaaaatatgttgagataaacaaaactgaccttggccatagatctggtgacatgatgagtagtatctaacgaaaggctcctgggctttgcgatccttcaacaaatgaagtgtaatttagacaacgtgttaaaagatctagtcgtgtaatttatctaaaaagcactaagggaaaattgttgagataaacaaaactgaccttgtgggctttgtgattcatgcgatgagagatgagatttctcttttcaaatcattccatcgtttttgatagaatagaacacaaatcattacagtttctttcgtggacttaagatcttatatattctttagtgaagaagagagacacgaataaaaagaaaaatgaatataataacagcttttctgatttcagattctctacatgtaagagaatggatcgcttatatgttttctgttgataagtgactaggagacacaaaaaaaatgtgtggttgttgttgaaattaaaactctaattcataaaatttccttcttaattttcgtttgaacaatttaagtttattcttctctttcagtcaacaaatgaaggaaacattaatgctttcctttttattattatatttaccaaaccatattttattttttctaatttatatcattttattaatattgttttccttttgaagcatatctacttttaacaatgtgtcaatggctggttcacaaagaaaagaaaaaacaatgtgtagtggtaatgcttaaatatttttataaataaatcatctctaaattaataatgacgtgattatgatatttattaatttataaaaatgattcccttcatttatctatatactaattaacctaaagaactaatttgaaccaaataaatgttggtttatcgaggtattaagttatcgagtattaatttctaaagattatattcgtacatgcaaaatattaagttagtacgttaaataaatatttgaaagaaaatttttaaacaatgatgtggtgttcttcgtcactttcttagactaaaaataaatcctacgaactatactccaaaatgtgccagaacaacaaaagtaaagttacaaaatcaacaattatatatataaagatgtctataccttaggcatgactttgaggacaaactaaatcccagatattacaacatgaaacaaacaccgaaaacattaaatacttgaaagttgagaccatatataatcttcacacaaatgattaaaggctaacttcttagtccttacagatagattcaaaccaaatctcattagaagcattcgatactaagctcctcgttaccttttggaagttcctttagcttggcaactgccgcttctatctctttcttcttcttttcatcaaatgatgtcttaatcatcatcttcttcattactgtcttttgcatcacgaaacgcgacgctagtgcaaattgttctttatttgaacccttgaaattgtgcatccatatagtatccacacgaaagtcagcattgggaaacggttctgccttctcccataaattgttttgtgctccaccgtcagaagaattgccttcttccccaagaggattgttattctacattcacaacaaattaaagtattgtatcaaatctcaatcaatattataacaaaagtgattttaaagagatcaaagatcaaagcatccaattaaaatggaacatgaaatgaacatataccttaaatgatatttcaacttctatcattttttcagtccacacagctaagattttccttagcacttctacttctcgaggattcttcaaatctaaactcacagataaagatgcaggtgatgttgcatagttggtatcccacttcaccatcccgttgctttcttgcttctatatttaaatacacaattaacaaacatgtcaaactaaatataaatgtttatatccttaagtgtaatttcttgtacctgagggggacatgagatgttgatgctagtatgaggcaagagtcttcctgctacccaatagtttctaccaaactggagtctaggaatttcgagaacgacgttatcactctcacatgggatatattctatggagagaatatcaagacgagctgcacgcacttcaatgctatcaatttggttgcatgacatggacaagatccttaacgttttatgatcaatcttcaaatgaccactggggttgaagaaaatgatttgtaggataagaacctcgagggaggggcaagacgagatgacttcgttgaaaacatcaacctcagcaaagatttgaaacaggtcaaggtacttgagatttttacaattgttaaaagcttgtgcatcttgtaatatgtattgatatagcgagagtgttcttaggcttggatggttgaatgtctctgtggacagcttgagcacattgtcttcacctgttggtgcgaagcgaccattaaaatttgcaaggataagatttttggtgtgtttcatactagtcagtgattggatccaagaagcaagcatcccgtcttccaattggtatgaataatgggatattatgcaagtctctaaatggccattgtgcttgtttataacctgaaaaatgcaaaaatgattaagatttaaataaggacaaacaattatgaagagtctatgttttcaatttatacgtgtttctctttatatcgtatatatatgttgaattttatagaaaaattgttaatatgtaattttatgtatgtgtgtatttattaatctatgtagaaaaaggcatgagatcatacttctctagattattgatcataaatttgtttaacataagataacgtttcgggcgaaataccgttatttgttttaaatgtaacaatgtttcaaaaaaataccgttatttatttccctctaaataccgttaaataccgttatttgctatttattttattttttaaaaaaaacataaatttgatacatatacatgtctatgatttcacatttatatgtatgaaatttcttataagtcctcaaaggcaatataacaattttcatcttttaatccaaaattccttttatcaataactgatttaaacttgtaagattgaatattgagagaaaaatgaaaagaacctcggttataattgacaaaaaaaaaaaaaaaaaactcggttatctgattagcggcacgatctaataattgtggcaggacaatcccgttgatggtgatggtctttcgcatgtcaaagcaaagatttgacacttgtttccatgtatccccccattgtttggacaaaacacatgtctttatcgcttcttctgtggacaattctgataagattttggacaacatatcgtcaggaagttgattaacattatcgattgcatcgatactgattcttttgttcgatgatatagaggatgcattttgtaagagagacatgaatgaagaaaagagagtttgactcaaaaactaaggaaatggaagtatagcttatttgattttattgttgcaaagaggcacatcgtagagtatatatacacaaaaggcaattcaggttaattaattaccttcccgtttttcaattggagaattttgattattattttttgtctacatttcaaaatgagaaagaaaataatcatttaatacgtggaattatagtttagtaatacatggcatgaaaataattttatcaaattttatttcggcatcaaaatttgtgtgttttttttttttttttttgaaattaaacttattgttatgatgcatttattgagacattatttgatcgatagtagcaattttaggagagtgtctgttgtatatatatatgaactatgaagattgaaggctatttgatgtactgtatatatgtaatacttgggacatagctaaatatgcatattgtgtcaatttcttttacttatctagcgttttctgtcaaattcattttcagtttgtagattggtaaaagtgaactgagaaatacaaaatgtctttaatgaaattaggtgtttactatctagtttctaaacttttggtaattcagtagagcggcacaatttgcagtttcctacgaagagatgattatcttgacttttataattagcatcagatatccgatcgccaactaatccctacaagtaaatcagtccaaatagttaagtggtccgcacagaacaagtttgtttgcagtggaaactgaaacatcaaatatgtgcgagtttacatcctaacctaggttctttagtgaaattgatcctctcacaacttacaagtccaaacaaaatatcttcatcacttgagttgagtccatctatcgttactgttttcagacaaatccaatggtccccatatcagcggctgctctcatctccttcgacaagtccacattatatcttatatcgatctatgctattttattatacaaaattagaaacatttagtaagacatcgacacatcggtaattatgtttcatcttatcatatttatcgggaaaaaaaaatgattttctctattaaaaaaaaaaattatccttttttaccattatgtagttgaatttaggttgcttcttaattttttttaaaactgttcaatatttactcacacaattaatattgtgcctttttaaaaatggaagtcctaatttttgttaggctatcaattttgctgactaattaatatattatccataagaaattaacttttatttaggcaaatatctctgctaaacttggcaaacatttatcaaaatctacatttaatacctcaaaggatttcataattgtcttgccaactgaacccaattattagaggtcaaacttgtactactaactttaacaagtcaaagatattaataacttgtactctattcttatcatctcattgcccaaaaaaacaactataaatacttacacaaaacattaccaattcggatctacgattttcaattaactctcttcttttttttttttttttggtttttcatttaagtctattcaatcatggaaaccggtttaaacatcttaaagctatcgctatgcgtcagcctagtcgtggttggatcatatgctcaggctcccgcaccatggaatccatctaatgggtttcgtccggggacatgtgaccactacgagtgtcccacctataaattggtagaggccggatacggctttgagatccgcatgtacgacgctgccctatggatatctactagtcctatcccctccctatccatgactcaagccaccaaaaccggtttccgacggtaaatgaataaatcgaatatataagacttggtgttctttcggtttctttatattataaactgaagttgactacgtttttgggtttatagattaaataggtacatagaaggagataacaagagcaacgtgaagatgaacatgacagctccggtgatcgcacaagcaacgcctggaagatcagtctacacggtctcactctacctcccgaagaagaaccaacagaacccacctcaggccgatgatctccacgttcggtctacgaaaccaacttacgtagccgtgagacagatcggtggctacgtgtcgaacaatgtagccaaggacgaagctgcggctctgatggaaagcctccgggattctaactggattttgcccatcgagaagagcaaaggaaagttgccggcgtattttctcgctgtttataacccgccatctcataccacggctagggtgattaatgagatcatggttccgtttaacatgtagatcatgttaatgacgccctcacgatttgattgttacgtagcaattggattagaagaggtggtttagaaccgatcgatactgtaacagcagcttgcagcttctggtttaaccggtataaattgtatctctggttaagtggtgattaatattgttattttgtaaaggtggggaaaactgtaaccaaaaagtttgataaaagattaaataataactaagattattgaatcaaaattgaaaatcaaacctaaatatcatcgaatcaaaaaaaaactgtaaatgattttttcagtttcgctttttttttttttcagtttcgctttctagaacacttataaagctgtaaaagaaagcacctgatcaaaaccatgaaaaaaaagagtgaaaaataaatattaggaaaatataaattaaagcgataatttatgtaatttcgatatttttaatgcatattatttttgtcggccaacttgttatatttaatcatgtgtttacaatgcaatttaatcctatccgaagatgaaccacacacataaaaccttatctgttacaaaaaaaatgtttatgtttttcttcataaatgtataaaaccttgtatcagtttacgttgcatggccgcaacggaaaacaaatccgccaatggaagcggctctgagcatcttcaagctctcgttccttctcacccttctctccggcggttcagaccttatcgactcgttgccgccgaattgtaaccgagccgagtgtccgagttatgaggttgtccacgccgggaatggctacgagattcatcgctacaacaccaccgtttggatttctaccgaaccaattcaagatatctctctcaacgaagcttctggcaacggttggaaccagtattttattcattattcattcctaaattaactaaggtttttaatcgaaaacgtattcaaaatgcgttttgctaatttgtatgcagattgtctgattacatgaacgggaacaacgattatcaccagaggatagagatagcacttccttatatcacccaagtctctcagaacttgagcaccttcatagtctctttcttcgttcccaaggcattccaacctgatccacctccgggaaacaacctccacgtacagagatgggactcgaggtacgtggcggtgaagcaaattagtggatatgttgcggatcataaaattggaaaacaagtggctgagctgaaggcgagcctacaaggtaccgtatgggccaaggcaattgagaaaagcagagaaaccggcggtgtcggatcggcttgggcttacacggtggcgcaatttagctggccgttccagtggagtcagcgggtcaatgagatttggtttccgtttgaaatggaagatgaagaaactgttagtatcgttactcagtgaacaaaaaaatgaacacttttttatctttttatggtgtagtgacaaagcaaagccattgagataagcctatctcctaaaagttgttaaataactgtccattgtcttactctggtcagcacattccctaaagaaaagaaaatcaaaagagtacttttttctgataagtgataacccacctgaggctacatactcaatgcaactcacagcacctatgtaagaaatgagagctatctatataatcgaacaaaacttctaatcaatgaactcctgattacgcgtttgttccagaccaatagaaaactcaaatccacaaagaacctagcatattataagaccgcttaatagaaacacccctcaagaaaagacccgaattcttgaatcacctggtttatttacaacgatgaagacaacaaaagagcagaagaaaccctaattttctcaatcttttgatgttaacatgagcaggagagtaaaagaaagatttactgatttcaagagagacaaaatccccacagacttttcaaatgttctaagaatgacataatgcaaaaagttttgaaaatgacactccaataacacatatactgtatacatacactctaatagtgatcgtatttgcttttgaaaacgctactcaatcagatttaagaaaaaataagacttgaaatctgtgttatgtcaagcataatactgaaaactctgtctatatttcatttttattctatagatagtccctttttttgccagcatttatacgggtcataataggttaacatgacagttttatactagtactatttttcattattgaacttttatttggaagagggaaaattaggagtcagacagagaatcatatagggacgtggcatatagccactccccacgtggctcgaagccacttgatacaaaacatgtcataatgtgggtcattttttcgtaccattcttctcgaagatttgtaaaatatctctatctcaaccgttggatctagtatgatcaagatacttgaggatttcgaaaaattgtcgagaccttttaagaaggatttttacttctatcatgaagtagctccgaaaatatcggcatctttaaggcccaaaattggcccatcttcgttcttctatgctacgttcatgattcgtgcttctatccaaatcattggttgtagacttgtagtgtcttttttttttttttgttataggttcgttgtagtctctgtacaattatactaacagaaaaaaaaaatatatataagaacagaaagtacacaactgtaaaagaaaagcattaaatatcatatacttttaaaccaatgagggaactccagtgtcatttttggcccgacatcactcacataattgaaggaaccagacacccaaataagtcgaaacaacttgaaaccaccctttgatattatccttacatttttttgtcttcccccgaataaattattttgtgggatattttatcgattcaccacctgaatataaagattggattgtaatctcttcttatcaccaccttgacaaattataaagcaataatctactttggtctttataaaagaagaaagaattttggtaatcttataaccacattgtttcttagacaaagcaatataagtcactttggtaattggtattaatcgtatagtccttctttctaattaatcgtcaaatgtatatttctcgacataaactaacctacattatagtttttttgggctatattctgatatagtattacctactacaattatatggggtttaagttaaaccgtttaaccaaccaaaaaaaatatttatatgatttttttggcccgtacatgtcggttcttgtttctcaggctgtccctctatggctatccaatcgcttacgtccgtccaaagaagattttattcatatcgaataataaatgtttagttgttattatatataacattattattttgggtaaagaatctaacattatagttcacatcaatctttaaaaaggaacctacatgcgaaactattgtgttctttcaaatatatttctctcatcgaattgcctcctacgtggcttctcatgtaccaccacccctcaaggctcaacatatattataacaagaaactttattcgaggataatgtctgtgtatgttctaaatagtgaatatagttaagtattaataatgtatctcaattattatctatttatgaaaattgaaatgctgacaccactgtattagactgttattctgttagttaataaggctaaagttaattgacataatgtgtatgtttacctctctagatttacaaaaaaaaaaaaaaaaaaaaaatgtttacctctcaacagaactaatcagttatcgctactgtaaactaagaaaacgatttaattattatcaagattttaaaattttatcaaatattccttacaaattatttttttgttttgggatatcattttccttctcccatatttttgggacatctatttgataaattcttgaatacaaactgaaattaacacagttgtgttgtggtatagatacgaactgattttagtcggcaatattagttaagaatatttaaccagaacatgaaaagaaaaagaaatcatttaatcctttgaaaaatatttaatgcggtattcaggtgagtatcatatttatcaacaattatttttatagcatgaaagtatttccgaaaaaggagtaacgggcatataaccaacgtggaacaataacggtctcaagaatgcaaaacccacaaagatattattaattgctgattctttgacagtgacagctgcctccgcaactttcttagtgaacgtgtcgattttgttatatgaccccatatgttaataatatgaataagagtcaagtattttgcctataaaaaaaataagtgtcaagtatagaatctttaatttccacacaaaaaagagtatggtctaaagttgatgaacaatgaagtatcgatccatttttctgtaaaactatttgtagcagatttagcaattatattccactaaaaatgaatcttgatattgtttggaatcttaagtttttaaatgtgagagcaccccaacagtaaagaacataatccaaactgtatgtttggataactatatcatttatgatataatgcattgtatctttgatataatatttaagtaatctgtcttaagaaaactatatatggaccacaaatttatttttatgtggttattcataaacactttcttatatataaccgtgaaatatcgcatatttgttccatggtctgtccaaggttgagtctagtttttgataatggcacctaaaatttgaattcggatcaaaatatcatccttctaattaagtggtccgaatttaggtatttatataaacactttataaatcaacacatcggagatatatacaagtatagtatgtatgtggtaataaagagaaacactaggatcctttcgaaaagccataccatacccctttcgaaatttcaagttcattctgcgaacatttaaggacataaagaacgaattagattcatcggaccggttgacgaggtcatggttggtcgccgggtcatgactcatgagttgttataatcaccgaaagtaggtgatgaatacatagaggaggcaaatcagcaataataataaaaaaaaggatacttataaattatgagggaaaactagtacgcaactagtgattatgttgtcagccaacaaactcccataaaatatcaaattcctatcgctctcaaatattgtatgttttatctcgataattcttctttaaatttgacttctgtactttaaccccaaaaaccaaacattgacgtccatgataattaaaacaaaaacaaaaaactgttgacaaaccattttaaacgatttttttactatttagcaaataactaatcacaatggaggctttcgcaaatatcgtcccgatatattcaattttattgatatagatacataaaagagaaaaaaataagtgattagctttagttttgaacagttttgatcgtacgtcgttgtaagatctttatcatctcatctgctatatatacactcctccgagtacataacccaatgtctcagccttcaaagctatcaaaatcaaaaaaattctatcaaacaaggaaatatatcaatggcggtattgtctaaaccggtagcaataccaaaatccgggttctctctaatcccggttatagatatgtctgacccagaatccaaacatgccctcgtgaaagcatgcgaagacttcggcttcttcaaggtgatcaaccatggcgtttccgcagagctagtctctgttttagaacacgagaccgtcgatttcttctcgttgcccaagtcagagaaaacccaagtcgcaggttatcccttcggatacgggaacagtaagattggtcggaatggtgacgtgggttgggttgagtacttgttgatgaacgctaatcatgattccggttcgggtccactatttccaagtcttctcaaaagcccgggaactttcaggtttttaagtgctctgttttcgagttagtgctctgttttttgctctgtgtttgtttttatagttcatgttctatagctttttatgctttattctggattttttttgtggttacgtctcaagttttgttctttaatcttcagaaacgcattggaagagtacacaacatcagtgagaaaaatgacattcgatgttttggagaagatcacagatgggctagggatcaaaccgaggaacacacttagcaagctt

SEQ ID NO: 142 - DNA, 90425 bp, Arabidopsis thaliana
ctctttacgtttgataaacatgattgttgagaaaatgattggagcgagtcactgattaccgttctaagcaaaaatgggaaacgctataggcaaagcatcaaacgacatcggaggttttatcgggaatattttcacagcaccgttaaaagccacacttggaagatcctgtttgtaagattttcacgtcattgtctgaattctgtcgtgaaatcgctttggtttgtttttctatcgcatgttttgaggatttctcttctgtttaaaaattacagagatgtatgctcgggaccatgggatcttgagtgtttcatagaacatttctgtcttcctgatattgcaaagcttgtgctgatgtcaagcctctgtttcataagtaaacctttctcttatttccgatttttagcattcactattgattctgtgaactttcctttgttttctataattttgtatttgtttctttttcccagttttgatgttcatcaccctcctgttcaagcttggaatttgccaatgtgttgtgaaaagtatctgcaaaatgtcatgtgccgcttgtgcagcgtactggttcgacattggagagatgattagttgcttgtgtcacagtttgactaacataaatcgggtcaaccgtcgcagaaaacgtctcgatgatatagaagctacgacctatgattatccgagtgatgatgaatcaagttcatcggacagtcccagtcgaatagataacattagaccaaagcagagaagaagaagactaggaagcaaacacagccaccaccatcatggcagcaatcgcaacaaccgccgtctcataagactaccgagtagacaattgtctgtacgagttggaggcaaatcaagaagagtaagaagaagtactagaaagattaaatcgaggaaaataaagactctcaaagtcaaagatgtggttgattaaaatgtctctagaattccttaaagagtgtctctaaactcaaaaacagaattatctcatttattcagatgaaatgaaacacaaaaaccattaatccatgtaaatcattttataaccaacctctctccctctctatttgtatatgtgcaagagagtaaataagccgggatggataagtaacggttcactttcagaggaaaaccggagccatgacgagagttatagtcgcaagcatttttatgaggacgtgaatggatggaccggctgtgtccttgaacggatctcccacgctacaattttcagatgaattctaatgagaaatcgtattcaggaatataactttgaatgagtgttgaagtagaacgaaaatacttacgtatcaccagtcacagctgctttgtgagcttcacttcctttgcccccaagtgccccggtctctatgtatttctttgcattgtcccaagcacctcccgccgtgtttaggaaaagtgccattaagataccacaaactgttgcaaacatgagcatagaagctacaacttttgctccgagcagaggttgtcctgtgtagtaacccaagattcgaaacaccaaacctgaaagagagaacaagaggtttgtttttggtcacaatgttgtggtttcaaactttcaatacagtaagtaaagaaaaacgagtagatattactgacttaccaactacaatgggtgatgcaatagctaaagctcctggctttatcatttctcttaaagctgcagatgcgactatggcgacacagcgactataatctggcttctccttgtactcctgcaacaagatatttgctagtcaacaacggtacaagccaatacacaagaaaaggtgaagcactcaaaaggaaaaatatgctcaccattatgccaggcctctcaataaattgccttcttacttcgttgacaacctcttgtgcagttcgaccaactgccgcgcatgcccaagcactaaagaggaaaataagcatggcacccaataatccaccaacgaacacttctgggatagcaatatcaacctgattttatccgaggatgagtatgagaagttgtctcaacatcgagaatacagcaacgatgcataacgaaatctacctctttgaaagacacattagcaaacgctgaaacctcgtccatatacgcactaaagagaaggaatgatgcaagtgcagcagatccaatggcaaaccctttcgttgttgcttttgtggtgttcccaacagcatcaagaagatcagtgatctcacggacactctctggctgcacgaaacatttattatttctacatagaataaagatggaacataagagcctttcaagccaatcatgtgacatcttacctgctggctcatctcgacaatcccaccagcgttgtcagctatggggccaaacatgtccatagtaaggacataagctgcagtgcttagcattcccattgtagcaacggctgttccaaatagacctccagtgggaataccattttcgtccactagacccgaggtattgcccaaccaatacgcagaaataatagctacacttatagtcaaaactggaagagcagttgattccaggcccaagcttactccagcaatgatattagtcccatgaccagtcgagctagcaagagccaacgtccgaacaggctcgtgcttatagtctgtataatatttggatatccagacaaagatataggctgtgatgatgccaaccaacccacatagggcgaaattgaaccatgcagatggagcttgttcagtgtaaagcagccagcgagtcgactacaaacataaataatgctgtcagaagaatatagcaaagaatttgttcgaaatttcagtaataacaaggctagtgtaggctaatgaaaagtctgaaccaaaaagcccataaaaagcagaattaattgtaaaaagaatgaaaggaacaagacaatcaatggttatgtgtgacaacattaccgcgccaaatgttataacagctaatataattgtcagagaatatcctttctgaagtacagccattggatcctctaccggagatttcacactagcatcacgtgttcccttgattgatagaataccaattgaggatataatcaagtcaaaagaatgaacaactagaggaaaaaggataaagcctgatggatctgcataatagagaaagatttgagtaagtatcaagcatgaacaagaggtttaataggatgtttatcagcgcatatctaacaaccactgctagaaatgggtaatgttattgaaattttttgactgcagccaagtgtagcttgctgtcatgaaaagtagtcttccttcaattttcacacaatgcatagcaggttcgtacaaggtgcttcaaacaataactctatacaacttatgtcgactttttaaatcctaacaagtaataatgtaccctcaaatcctcaaggagtgaccaaaacatgcaataaagcgtagattattctgtatacagaatgtaatttacgagcttgaactctctatgcaactcttcctaagtttgcatttcagattataaaatcctagcagttcatttaattttctcggtatgagtcaggaactcacaccataagttatatatttgcatataccagaagtaactttaaagagagatggtgcaccttcaattttgcacttcttagccattgttccacctagtatcattgcactgatgatttctgcagctatactttcaaataaatcagcacctctagcagcacagtcccccacattgtctccaacctacaagaagatgaaaatggctttaaatgcctaaatgacgaaaacacaagcaaacccttgtagagtgatatatgccccaaacaaggatgtcacgtttgggaatcacagaatcaagaaagtaagaaacaaaaagaacaaagatcaaataccaaatcagcaataacagcaggatttcgaggatcatcctcgggaattccctgctcaactttcccaacgagatctgccccaacatcagctcccttagtatatattccaccacccaactgagcaaataaggcaacaaacgaagcaccaaaaccatatccgacaagaagaagaggtactgtaagagaaacagaaaattcaatcaataaatcttacaagtttaatagctccactatcgcccatgcaaatgcaaattctggtcaataaatcaagagaattacatatagggttcactgaaaatcttagaactgtattggtaccccacctcaatcaagattaatacaagtcatgacatatttaagaaaatactgctcatgtctgaaaatgatcctttgaaaagataacaataactttttgaaactcagtacaatgattatagaatatacacacaagacgaaaatgaatatttttcataaaaaaaaaagagcagaagacttacggtcagtaacattcattgagcctggtgaacccacgcccaaccacacataaaatgtagaatagaggatggcgataccaatcacagccataccaacaacaaccagggctgaaaacccaccagcacgaacggctatctgcattatatctgccacttagtatttggaaacgtgtacatgacatgttaccaaaatagctaaactaaagaagaacctgcaatgcttctctcgcagatcgtctggcagcactggagacccgcacattagcacgaactgacacccacattccaacatatccagcaatacctgagcatagagcccccaaaagaaatgcagcaacagtaatataagcagacatcgccctgcagcaaaatagtaatatggctaagcttcattcacaacaattcaaaagataaaataaatcttgtgaatgtaatcatgtatcagcaccttcctaaaccagcagcctcttgctggggagttaagctacggaatagatatatgcaaagaatcacaaaagctagcaaaatggccatcttggatatagtgctatactgcgttctgaaaaaaccttcagctccatcacgtatagcatctgatatctataagtaagagaattacctcacaaattagaattacaaatttttgatgagaacaaagaaggaaaaatgtcaacatcatgactaacaccacataatctgagtgagcttacctcaaccatctctggaggtccttcatctttcgctaaaacccacttggttagatatattgacaaaaggaagctgatgatgcatactgtgaagacgaacacgatgatgggagaagtacttgcccccatgtaaaagattgctccgaagcagaaaagcagaattatcgaaaggacacggacatttaatttcctaataatccggaatatctgccaaaaaacaactaaactttatacaatttcaaagaaaatgaaaacgagatgctcaagaaactaagatgctaaacgaaatagaaggaaactagttataatacgcatctcagtgatctgatgcaagcaaaaagaaaagcactcaagaaagagaggaataaaagttgtaccagtggactataggttttactacgcatgttgggaaaagccctaggcctgtcattgaaagacatcaaactggcctgctcaacatcttcatccatcatcatgttttgagctgaattagcccttcggactatgtgtagaggcgtaaagtcaatgctatggggcaactccgccccagaactcggacgctgaattttaatacactacaactttttcctccaaacgttaacaacagcacatcacaaaacgagcacaagttagtatgaaccctcttaactctagctatatctttgattccagcttcttcaaactttctcagtagagttgccacaacaagtttccaccacaatcaaaatttctgaaaaaaatagaaaagtatgaaaagttgtgatgtttctctttaccaaccaaatagcatttttaaatgaaatataatcagagtaaggttctacagtaaagtttagctataactttcatcatttcccatgagcgtaattgcttctacgatcaattccccagaaaagtgcgattaacaaacagacctcaagatctaatcgactaagatttcagtgaataaaacgcaagggactttgcattccgagtttaatgaatcaagcaccgttactttaatttagatctgagttctgttctaagagaaattcacatgatctctagacaggaaatggatacgtttccagaaacgaatccaacgaaaaaaaaaaagcatacgaagagtttatccggaaacaaaccctaaaaatcggtaaaacagagaagatgacggctccggtgagagtgatcagaaggaaaccgccattagcgaaagcttgttgtagccgaagaagcgctctatcctctcgctgtctccgttctaaatccgaagacttttcacagaactttccgaatatttttttcctaaattaatttttctacctttaattttattttcactcctcagtggttcaatactaattttatgacacatcctatccaatgagtcgttgacacttaatcactattctcacttaaaaagttaaaaacttaaaatcatcctcgtttgttaaattatatagatcgagttaaattatcaaaaatacccatcaattttggaatattaacatttgaatattatatgggcctagcccaaaattatgttttgccattcggcccatataatagacaatctgcaaagtgaagaagaagaagaaccactaacgttatcttaccggcccgatcacggagctcacctttcatcgtcaatctccggcggacgaatttctcttcgtagccgttacttctcattatttctttgaaactttcttagaaaattctctgttttggttaggacaatacaaacagaggatgttgatgacactagcggcgacgacctccgtttcatttaactcgaagcttctcctatttcgaatacgttgctcggattctaaccctaagcgtggcttcggctcaaaaaaggtttgattccaaattcttctttgttcaacttaattttgttgattcaaagtactgagacaaaaatgtgaaatcgcatcacaggaagagaaagacccggcattgcagcaaaggtataaatagtttttgtgtttgtttaaagcatttagaattttaaattgctgttgttatattttcatatggacttctttgctgcaggaaatcatcttctaaacagtctgtttctgtacccagaagtaagtataatttgattttaaagcatattgtacgtaacagatgttgctgctctccttcatggtgtctcgaacataacttcatttttgcattcttcagtttatctcaaaaagttggtttcaattgaaaggtttgctcaagaaactcctgcatttgtttgcagaggcacctggtctgaatactcagtttgaaggaaaatctggtcgatcttttgatatagacttcgatgaacggctggaaaacatcagaaggtacctatgttttatgattctagcatgaagattggctttagagatatataggttacaataggattattcctctgacaatcacacttgactttctcattatacccacaacgacatgatcttcctatgaaagtttgattctttttttttcttgatttgttcatcacttgtcttgctttccacttccctcaccccctagacatagtcaagatcattgtcctcccactgatcggaatgttatttctgtgacctctgctcttttgatgaatcaggtcagctcttgagcagaaaaagacagaagtagttaaagaatttggtccaattgactatgatgcaccagtcaagtctgaccagaaaacaattggtcttggtactaaggtacgcatacataacatcttgcaagtgtttattttttattttgttctaaaaccacttgaggcctataagctactcatacataacatgacaaaacttgggcccatgccatgacaggttggagttggcatagctgttgttgtatttggtttggtttttgctcttggtgactttcttcccacgggaaggtgcgttaagtgaagtccaagtcataactgtgtcatttacaccatgttactgtttgtcattttccttctttttattccagtttgtaattgtttgtgtaaagattctgatgacatcatatgttcttaggatcagctgggttggtttccgtaatttcacatttttgtcataccaagtcatgttgtcatgtaatttagccggtgtcagttctaacaatgtttttaccacttttcagtgatagtccaactaagaacacaacagtagttaaaaatcaaatttcagaagaagagaaagccacgcttcaggtaatattaggggctgatcatgaagatttcgttcatgaactttgataatctgaataaagtaagatacgtagtaaacatctcgattttttttcattttgcagcaaaggctcaaagagtttgaaacaactctcaatggcacgcctcaggatcaagctgctctggaggtgagtgataacatgcgcatgttgtgcatactattaaatatcttcttcatcggcatttagccattcatctgtaggcttccaatagtaacaaggaacaacttaaactaataatcaggtagtatgtaacagttcttacctccacatcttaaattgcatggaacttttctgtttgcattaactgattcaccgaagttagtaatgtacacatagtatgctgaaaacaagataggctacctcttctgacttatttataatgctaaaaaaattcttaaagttggggcactatgcagggtgcagctgtgacactgactgaactaggagattattcacgggctgctgcgtttcttgagaaactcgctaaggtttgttctctcatgcttttatattttcttatggtttcacatgaacattcttgtacgagacttagctaatagtgtgtacaaagtgggattcttgctcttgctctgtaggagagaccaactgaccctgatgtatttcgactgcttggagaagtaaattatgaacttaacaactatgaaggcagtatcgctgcatacaaaatttctgaaaaggtaaatgctcttaaacttcgtggattaagctttttataacttttctcacttgcattgaactaatagttgatacagactaagattgtcagaagaattttctcgtggggacttaataagatatgaactgctactaccatgtatatgttgttagcagagttaggacagtcaatttttctatctataatagtgatgctctaagttttgttctaattaccataggtttctaaagggattgatcttgaagttacacgaggcctcatgaatgcgtatttagctgcgaagaaaccagacgaggtaaatctgtttccaccagatatgaatagaaatatgttacctttttgtctaagaagcttaatcttaaatactcgcaacttctcctccgatccatttcttttcactttgttatgattctcaggccgtcaaatttcttctagacactcgtgaacgtctgaatacaaagaaaacaagcacaactgacagtgttacagatgaaacaaatctagacccaattcaggtaacttggtttcctggtaatggactcttaacatattagtctggtcatgacaatacatttccttgatttgatagacatttcttcttgtttctgatggcttatctgtttcatattttacgtccgaagaaaccagatacaataatgataacatactactaagatctgtactaggttcaactttgtgacttttatatctaaccgattttaaacgctggggggcaataaatgctcaggttgagttacttctcggaaaagcgtattcagactggggacatatcagcgacgcgatagctgtttatgaccagttaatcagtgctcatcctgaagacttccgaggctacttggctaaggtaaatatatcgtccccaccttaagaagagtcactcgatataatttgccaaataaactccatgtgaaatggttggtgttgtagggaattatattgagagaaaatggaagcagaggagatgcagagagaatgttcatccaggtgactcatttgaactcatgaaaccttttcattccaatacaagtccaaatgagtaaaaaagtatgacaaaccccacttaatttgttaatgtgtgtaggcgcgcttttttgcaccaaacaaagctaaggcccttgtggatagatactccaaactatgatcactatctgattctgtgtatataaatatacatgcacatgggcctgtgagttactaatatgagtcagattcatctgtgagacaactgtacaatacaaatattcccaatatgaagccacagaaccaagaagttcaggaactgttatctaataataaaaaggtagtaaaagagctacaccaaatatgaagacattaagttccaactgatcttcatatggctgggcattgaagctacaaaccgcaagagatccggtttatcaatgattcctgtgtgaagcggctctgtttcctgttggttcatgacatgtaggaacttggcaatgtttggaagtaccatttcccggcaatggagatgtaacaaaggtacttttgacaaaacgcttcccttttggacatcaagaccttctggtctgcgcagtttatatggtttcccagtagttggttcgatatcaacctgaggcatctgtttccatctcttgtgaacaaaccaaccgtacttgtaatcccctactattggagtaccaagtgcttcagcgcagtgtacacgtagctgttttttagaaggtggcttcatcaagagacaaaacaagaacaaaatctttcgcaaaattggtaaagaggatagcaaagtttaacaagtacctgatgttttctgctagtaataggacgaagttctacccacgaacacccgttgatcttaggtcctaacactttatactctgttattgcatcttgcgaagcttcaaagcccgaaccttgagccaaaaccaccctgtctgttttaccatcgtccaaaagcacctgaacacaggtttttgaatcattttcagatacaagcagtgtgtgagcaagcaaaggttataaatgagataactacctttgaaagaggagctgaaattagtccttctttttcctttggagaaccaatcaccaatgcccaatattgctgatacatcgcctcacacgctttgttccaagcctaagattgtgcaatatttacgagtcacttaacaattttatgttcaaccgttccttactagaccgtagtatgtttggttcaaaatttcagataagttctccttaccttacagcttgagtttctccccttgtagtcactgaacactgagtgaagataatctatactttctttggttcgacccattactaagaggccactagtttccctatcaagacgatgtacctgaccattgaaactcaaataattcagaaaccaaatcaatttatcaagataaattacaacacccccaaaaaagtgagttttaccaatctaggaccttcatcgttaccaaaagacaaagctgcagctgcaagtgcatccatgctattatgtataggcacatttccctgaaacaaagaatgataactgagtattcaggtgctgcttaatcaacaagaaaatgtaacagcttacttccacaaagtcattctgcagcaaaactctattaccttgactggaagcttaggtggcttattaagaactataatagcagagtcctgcagtagagagagaaaataaggttaaaaactagtctataagatcaaccaaaagagaccaatcaccgtttgaactcaagtgtaaaaacatccgcaaatccagaagaattaagagttaccttgaacctgacaagcctttgaagatatgcgatttcgtctgcgtttggatacaaggttccacttggtatggtgtcatatctcttagaaatcctcatctcagcgattgaaaccggcaaccagattttgtctcctatttgcatcacctcgttatgcttaatctgcggataaaagtgtacaatgctacctccattggaaaacctaatcctaagaaatgatcacaccaacaacaacaacaacaacaacaaaagatcaattgtacctttctcataggaatagctccatcttctttctctcttgaagcatccctacgacctcgaaactccatctgaacctgccacaaagataatacaatttattctctcatacaaaaataatatgttaacatatattcacggagtgtatctgaatttcattagacaatgtgatgatccaaaagaatagtctaacaaagctcaatcaaatatttgatcagaagtaatgaaattgttataccagagacactcacaaggccctttgtgaaatgagtttgaatagccttatcatagatttcttcaaaatagtacttgacccagcttatagctgtgacgtggccgccgctatctccatcgtcgccgtcagctccggcgtttttgccaggtaatggatgaccgggaaatggcggcagggatatcagctgacgtggcagtggtccttgcttcggtggtcccaggtgtgctacgttgtttgtcacgcggatcaccgaagacggcggcggagcgactctcgagtaccgccgtattagtacggtcaagtaaatctgacggaagcatgtcttggccttccacatgggggtttatcagaagaccggaggactctgtgtctagggtcagaatgctgaatgccggcggttcttcttcgcgcgctacggccgaggaagacgaagagagaaagaacgcgacggggaaagccaatttgggcctgttgggctttcaattcttactaattgactcgtcgatccaactcggtcgtgctaaataaattcatgggtcatatcacagacttgctcatgaaattagtacaactaaattattttgtgattttaaattttcctcttcaattaccgatttattatgtttacaccaccaaaccataaaatgaaaaaaaaattacaaaatgatggtatttattatgagaaaaataacggtatccccaatatgtttttggacataaaattaacttattgaattgagagggtacatcaaatcaaatatatgactcacattggctgtaccttattaccaccgaaataaaaacatgaaaacaacgaatcaaacatattacacagcacagcacagccggagaatcatgacgctcacagagctaaaactcaatcgatcgaccaaaccgataaataaaataccgaccactatgatagttgttggttcaaaaacacaagaaagagaccatgaatgaaaccctctttctccaaaaacaacccaattctgtggattttttttacttgcggtggagactcgacagcttaccgagtttcatcttccaaagcacggaatccagcattgagatcgtcgtacaatttcttgaatttttccaccagtgtatcctccccttctgctgggtcttcgaacttctgagacctgtagttcccataattccgtttcagaccattttattagagcgctatgtaacagagtcatagagaaatcgaggagaagcaagtcgtttgcttacactaaacggtagaaaagatctcctaagcgatgcttgataagagtgtaggtaatcttttgaccgtccattccagctgctctctcaaccgcctgtgtatccaaaacaattaatgggtttttacctagacaaaccaattgaccttaatccccacttagcatagtatgtataaatctcatcttatttacctggttggctaggttgtagaaatggataatgttacgcatcatccacacggacttgtagaaaggacagaatttgtcatatctgtcaaaaaattcatccaaaaggttcaagagtgaataacccgttgagagagaaagagagagtactaaaccaaaacgaagggagccaacaaatcttacggtgtaaacgcgttttgagcaaggtaatcttccctcaatagcttagctgtttccaatgtgattttgtccccttctgctagcgcatcttttcctacaagctgcacacaaaaagcaatgtgtgggtcaaataagttcctttcgaaaagaataacgtgctagcactgttttccttctataactcaagtcaagtttacatgccaagattatcgttcaaccccttcaaaatgtattagggttgctgagacaagagttcattggtcaccacaatagatacttatacaaggataagtgatacatacctggacaatttcattaagatcgtcttccctctgcaacacctctctggcctttgtcctgatgttgatgaaatctggatcgaacttctcatagaaagattccagtgcctaaaacaaaaagcagcgttttatatacaagatttctagatagtaaaccaagacaagtttgaaccgagaatatttaagcataccgttgaatactttgagtaagaaatcaaccaattaacagagggaaaatgttttctctgggcaagctttttgtccaaaccccagaagacctgcagaagaaaagagaaacaaccagaatggaagagtaagcatttcaaagtggagaaaaaaaatgcttaaatatacgagtctgcggcagatctaaaactaaacaccatctggttcatctcaaccaacatatacgactatgtaatctacaatggaagatagggaagcagacatgaaccaaataatcacctgcacaatactaagggttgctgaagtcacaggatctgaaaagtctcctccaggaggcgaaactgcaccaacaattgtaacacttccgttacgttctggtccaccaagacattttactttaccagcacgttcatagaaagatgctaaacgtgctgctagataggctggatatccactgtcagcaggcatttcagcctataaaacaaagcaaaataggtgtcaataaactgagaaaaagaaaagtgagatgaggacaacacgaacatccatatagcaaaagtgaaacgcataagattaccagccgtcctgaaatttctcttaatgcttctgcccaacgggaagttgagtctgccatcatactaacattgtagcccatatctctaaaatattcagcgattgtgattcctggaattcacattaaaaaaaaaaaaaaaaaatgagcataggcaatgggattcatcaataactattaaatctgtgtgcctgaacattacctgtgtaaattgaggcttcacgagcagccacaggcatgttagaggtgttagcaacaagtgtggtacgtttcatgacagattcctcacggccatcaggcaacgtcattgtcaattgtgggaagtccataagaacctaatttatgagaaacaatcagatcaaatgtccgatttgtatgaacaatatgcaaatttagaatgagaagagatatacctcagccatttcatttcctctctctccacaaccaacatacacaacagcatcagagttggagtactatgtaaataagaaaaagttagctttggaaattcaatctatccagtaattaaatggaacaaaaccagagagtgtcacaaggtaccttggaaagtgcctgactgataacagttttcccacagccaaaagcaccaggaatggcacaggttccaccaagaacagaagggaaaagggcatcaagaacacgctgacaacaggaaaagaaagcaatcagcaacacatgtattcaaatgactatcaccactgtaagaagaattaatcgagtaatcacctgccccgtaagtagaggagtatcggcagcaagctttgatgcaactggcctaggcgtacgtacaggccagctctgacatatatcaaccaaaccaatttaacagagtgaaccaaatagcttaaaatttacgtttgcaagtaggaagattaaagatacatgcaaacctgaagcatggtgtaagatttcttgatcccctggaattcaagctctatcacggtatcctgagaaatgaaaatcaccgacaaacaattattagcaacaagccaaacatgatctacaacaggaagtgattaccaattgatcaagttagccatatattaactcaaacgttgaattcaaagaaatcaaggaagaaaaagtttgaaacgtatttattcataactgtttgagggaaacttaaagtcaaaccttaagcgaatattgaccagctggagcaatgtaagtgatcttccccatggcatccggaggaagggcaacgaggtgattcatcaaagtgttctcaaagacagtctgcattccaaagtttaatttgactttcagaaaaaactattcccagtgtaaacaagggaaacaccacggtaactgtgtaaatagattcccttgtcaaaagcagattaaagaggagaccaataaacttacagcatacaagtcaccaccagttattgtgtctccctcgactgcaaacaaaacgaattcaattgaccatcaagattaaaaccaaatgaacacttccatagacaggcatatggagtaaaccacattaccaaatttattgggctggaactcccaaagacaatctttgtcaagagctggaacagacacaccccgaggaatgtacacatcaccggatattcttgcaatagtcttcaaaggcctctgtgacatttaaagaaatgaaaccaaagaatcgtaagaagccacataaaacgaatcataaaagtaaaaaaaatcatgtctagcaagattataaatccaactgaacctgaattccatcaaagatatttcccaatattcctggcccgagctccacagaaagtggctgtagtaaattcaggacaaattatatgttagctgcagatgaacaacactagaaaaaaccaagataaataactcgcgaaccttgtgtgttcgaagaacgggatcattaactgtcaatccagctgtttcctcgtaaactgatcaaaaggaagttgccaaatatcagttaagatatcttacttcgacagaggtcacataagatgccgtaaagtaaattacactaggaagcacaatagaagaaacaaaccttggatggtggcagaatctccttcaagacggatgatttcaccaatcaaattatcatgaccaacacgcactaactcatacatagcagcaccggccataccatcggcaacaacaacaggacctgaaacctgcatcccataaaagaaaatgtcaaatcactgagaactatcagatcagatcagaaattcaaagacgaggttactgaaccaacgcggaatcaaccgattcaatcactgataactatcagatcaaatctagctatcccaccaatcttacctggtaagcagatcaactatttcatctatccatcaccaaaaactaacatcgcaaaacagaaaaaaaaacaaattgaaaccagatcgaacgaaacaggataataccttacgaacgtaaccatactcgctctccttctcatcgtcctcgaaggtcgtaagctttcctccgtaaaacgccggcattttctcagcaatcagagattcaaaaactcaaatccgatcggccaaaaaaatcaaaattcacctcctagaaaatgccgagatccgatcaaacaacaacaacaacaaatcagaaatcgccaaaatcagacaactcttaaggtttttcaaagagagcgatacaataaatcagaaagaaacaaaaaggatcagagagagagggatagagatctcctaaccagtgaacagacaggaagagtggtcacaagaagaagaagagagaggtggatgcacgtagatagatattgaaagagttggagaagttttgatctgattgacgaaatcgtggagtgatccggtacatgactacacacgatacgcgcgtagatctggactttgtcgttaatagccacgtgacagtttatttattgggctttataatatatacttacggcccaataagtgggtccgtttagtcaacaaagacatgcggcttgagaatctctctctctctctgatcaagccggaaaattcacaaaagtgatcagttttgttttctcggggaaattttctgaaagtgaagaaagggaaagcaagttttttttgaagtggggagagagatgggagaaatggggaaggcgatgggattgctgattagcgggacgcttgtgtattaccattgtgcatatcgtaacgcgactcttctctctctcttctccgatgttttcattgttctcttatgctctctcgccattctcggtctcctttttcgccaactcaatgtctcgtaagttccctcacatttttcgcctaaatctctctggttacggtattggattttgttctttggtctctgatttagtcatttgctgtttggtgaccgagtagatacgaaatttgttggctcctttgatttgtgacaagtttgaatacttgctcgatataattgtttaattgggttgtactttgtaatgtggttgtgcaatcagttatgttaacttgattatgaaattgatttcatgtattctctgaaggcatgaactgaaactagttctcattgtatttctgggtgaatcaatgatgcatcgatcttatttgattactatcatcttccgttctctgtgatcaatgcatagtcataatcctagaatgttcaatgatatcattatcttctgctcattgtgtgtataactcttcaagacccttgctttatcataccacatgatttacaatcctataacttttctaaagggtaccagtggatccactagagtggcaaatatcacaggacacagcaagtaacatcgttgcacgcttagctaataccgttggagcagcagagggtgttctgagggttgcagcaactggacatgacaagagactttttgtcaaggtaagtgtgtcctttgttaccaacttactatgtacaagataccgttactattcttggatcatgagtgtatcaaaatgcattagcatcaatatatcaccacagagattctcttagaaccctagtgtctttacccagttaccatataaatgcattgctaattgttaactcagtaattgtgctctatactgaatatgtttgttttttgctttttcctttaggtcgtaatttgcctttacttcttatcagcgcttgggcgactcatatcaggtgtaaccgttgcttatgcaggtaaagcattcacatttcatctcaaatttatacagagtttcattttaatgtggaagagtgtagtatttcattgaattttaaagcattcacattttgtctcaaacttatacaaagttcattctaatgtggaagagtgtgctcttaccttataagtagcatttcatggaattataaagcattcacattttgtctcaaacttatacaaagtttcattttaatgtggaagagtgagctgttaccttatgagtagcattacataccaatatgtcggatttcttagcatttaacaaaagttggccatttgggaaacccttcgtcttgcctgtgtcaaatattgcaaaccaatgatctctgactagttcttctccctgaaacaggactatgcttgttctgtctctccatgctctgtcagacttctcaatctcttggaaactgtgtactaaagcgaggaaatggccagattttagaacaagaagcacattctgatacataatatgtctagcttttgtttatacttttcgtcttttctcatgcttacatgctcatagcttcagtcttcagagtagtttccccttatgtacattggatttgttgcatactaccttgtgaaaaatgtaatgatattgtttaacctccacaccatgtacttgccgatcctatatctataattgtattctcttttcacgttaattttggactcaaggcatcatcatacaaaacagtctgcaaatgtggtatgagaaccgaatctgcgagcttatgcggaaatatatatacacacgattcaacaaactgttataagggagattacaagaaaacagagggtaaagcaacagcaccttttccttatttaatttcactaagactggataggatctgatcagtctgtaaaaggtttgctttactctaccttatctaaaagtctaaaccatgtctttgcagctgctcttggtgattcgaatcttcgttgattcgtgttcataaatctacaaatcttgaagagcaagagcctgcaaagttttgaaatttgtttcattagaggtcaaagaaaatcttgaagtgtctatagccaaggcaaattttagatacttttagtccatattatcttatgctagctaaagaaggctttactgcccaacactctagcagagttttttcttaagttcatttgctcttcaaatttccctgctttcagctcgtgaaatcaatagaaagttatatacgactgttgcgaccatcttatagcttaccctgacgagttttggggtttattcctcgtcctcggagtgatatgcagtatttgaagtcatctccgtctcaactgattgaggctttacacctataatcaaaaacagaccaagtgttaagaaacgctcaaaagaccaaacgttaaagaaacactgtacctaacaaaaaaacatattttgacgctgcaacatttgccactgaagaatgcaaacaccacaatctattataaaacagagtgattattattcgacaagaagcaaaagcaacaagattaataaacactacaatcttttcaaccctataaaggaaagactctctatgttattactgatgatggtcacccatttccataactgacatctgaacctgtaaagaattttcaacaactatataacgataagccaagaattgcctaagtgcatctaagaatgtagcaatacctatgcagattatagatactgcaaatgtaaaaaccaaagctttttcaaaaccgaaacacatacgatcagacaattagagttaatcatataaaaaccacctttgatgaagtaatcagagcaaggccatcctcgaaccgatgagattgaaatagattcttcatcagagatcggattggccagcttctcaacgagcttagcgatcccatgagactgggatctaggaggtggaacccaaaaggaagcaccggggacaaaagggagccaatcaggtgcggatcggcgtaccataatccggtggacagcatcttccaacttattgacaagaggatccgcagcgatatcaatctcgtagattactccgagatggttagagttagaccgacgattggaggattgagatcggatgaaaatggtttgagatgaagggagaagaagagaagctgcggcgaaacggtatcgagagagagaaagtgaaggagataaagatcgagccattgtagagatttaggagaaagatggttccttttttttttggtttggtttggttgttccctttttctagtctttttaacggataaggagaaaaagagcattaatcttgtttatcggaatttccttttttaatcctttttctgccctatctgaaaatttactttctccgataagaactgtcttttttcaaaacaggtacatcatgcaaatattttctgagtataaaacaacatgagacacaatcatacaaagcatatactgatgtccaaaaatccaatctgtgtagtttttaagccatactggtgtttaaaagaaaaagaaaaaaattatacactactctagtgatgaagattgaagaatcaaagaactcaaaaacaagagcctattcgtctagtgggccaccagtccactcaaggccggccttttagtcacctgaagttggacccaacccataagtggggccggaaaacaccatataatccaataggcaataaccaatttcactagtttattaaataaaaatatattaatattattaggtgagatatcataattgataagaaaatgctccaacttagtaataattacaatatacacccttagtttaacacattgtaacaaaactctctcaaactttttaccaattaaatttggacagagacaaaaaaaagaaagtgtgttcttcactttttctttcctcagttggttgtccaaacaaaaaaaatctccaccgctctgagagaaaaaagttggaagaggagagagagagagagcgacaacgcaccaactgttgcggctcaaagagatctcgatcgggatccacaagacggagatagatagagagagagtgagagctaacggaaatgggatctcagctacttgagtgttgcttccgtttcgtcttctactgtcactcccacagctccaactgttttccttgattgtttttcttttatctcggcgttttactcggaagcttacaacacactctctcaggtgcgaatcgacgccgtcttctttttgttttctcagattgggtttttgtcttcctgtgatcatttttacttcattttgggggtttaggtattgttttagcttcgcgttttggtacttgcttcaagctctttttcttagtttctgtgatttggggattttgttagacatggcgatctgtgttcgatttctgctcaatcgcatttgaaattgaaattgcttctaaatcccagagatctcactgggtttcaagagatcagacatagaaattgtgattagggttttgtttttttcatgggttctctgatattatttggtttttctgtagcttttttgggggaagtagttgcaagaaactatgtagatctcaagtgatattagtatattacaagttccctgaattagatgtttacgaatagtcttaagtctcagtggtgctggctctgtcagagaaatggtaaaggcttttggcaaggggaagtgacttaatctcaaatgataactagtcccatcaaaacagctctgctagtgtttggtttctgagtctcattttcttagcatttagggatctatcttgcagcatactgtcctggtcgttcttggtactattttcttttgtgggcataggatgttgaaagctttttattccgtgttggtgtttgccaatgtttcgcttgtcacagttctctatatgcccatttctcatgggttattgttttgttctttcagggatttgaaatcctcacgtttcagcacattctttgtggttcccatctattctctagccagttcggagttgcctgaagaaatcaaatgggttcgagatacgcatctcaccagctcagcaatgggctttttgtgtctggccggccagagcaacccaaagaaaagcctccaacaatgagctcagtagccatgccatacaccggtggtgatatcaagaaatcaggagaattggggaagatgtttgacattccgactgatgggactaagtcaaggaagtctggccccataaccggaggatcgtcaagaagtggtgcgcaatcaggtccagtgcctaatgcaactggtcgtatgtctggcaatttagcttctgctggttcaaattcaatgaagaaaacaaattctgggcctttgtctaagcatggggagcctttaaagaaatcctctggtccgcaatccggtggtgtaacaaggcaaaattccggccctattcctatactcccaactacaggtctcataacatctgggccaattacctcggggcctctaaattcatctggggctcctaggaaaatttctggtcctctagactattctggttcgatgaagacacatatgccttcagttgtccacaaccaggcggtaactacccttgctccggaagatgacttttcctgcatgaaaagcttccccaagcctgtgctgtggctggttatacttatatttgtgatggggttcctcgctggaggcttcattcttggagcagttcacaatgcaattctcctcatagttgtggcggtcttgttcacagttgttgctgcacttttcatttggaatatttcttgtgaaagacgtggtatcacagatttcatcgctcgttatccggatgctgatcttagaactgccaaaaacggtcaatatgtgaaggtcactggggtaagtatctatgcatcctgggtgttttgcatttactatgtgctactgctttatcatgggaaatgacgaaatgtgatttggcttccttcctttggtatctctactatgttcataatattggtttttatattttgttcattgaaaaggtggtcacctgtggtaacgtgcctcttgaatcatccttccatagagttcctaggtgtgtttacacgtctacttgtctatatgagtaccgtggatggggttcaaagccagccaatgcttcacatcgtcgctttacatggggactgagatcagcagaggttagtagtggcatgatgatatttcatttcacagaaaaatggtctctttcagtgtggaatgtctctaaatgcataaacgttactcctacaatacattgcagaggcatgtggtagacttctacatttctgatttccaatctgggctcagggcattggtcaaaactggaaacggtgcaaaggtaacaccgcttgtcgatgattctgttgtcatcgattttaagccaggaaatgagcaagcctctccagactttgtaaggtggttgggtaaaaagaatctaaccaatgatgatcgaataatgcggcttaaagaagggtatgaaaacacaacttgtagaaaagaatgataaaaatttgacttaaaagagttactaaaggttgtgttggtatctgtgatacttctttcacatgcaggtatatcaaagaaggaagcacagtaagtgtgattggagtggttcagagaaacgataacgtgttaatgatagtcccgacgacagaaccattagcagctggttggcaatggagtaagtgcacattccctgcaagtcttgaaggaattgtattgagatgcgaagattcatcgaacgtagatgcaattcctgtctgatgcagtagtagtggaagtctttcttttccttcttcttccacggttggtagacgaaaatttcactgctccacttcggcttcattaatatttttcatgaaatctgaaatgtgttcttggttggtggccttttcgctctctactgatgatgattcctttggttggtggtttatggtagtgttttctttttcttctctcttttaatatttcttattttttatatcgagttattattacattaggatgataatgatgatgatggatgtggatttcttttctacaacttaatttgtgttgtgggcactcttctttgccttatggtttgtaatttgtaaagctctgctagttattcttttttcgacctaatttgtgatctaatgtaatggggattatctttttagtttggaatgttcccgttgcatgtggattgtatttattatttcctccttattgtttcttcctgagatcaactctttccaaaaatacaacagaatcacctcatcggggaaatgtatataaattacaaactctctctacatcactgccaatttgtaaaagaagtaaattccaacaatgatcagtaagtaacctatggattttgatgaaacttagaatttacagagcttagacactagagaaatatagatattttttactcaaaagactttgacgaacttcaaatataagaacgagtattgatcctaggagtaatgatacagtgtgattaagagagattacagagcagtggcggggggaaataaccagcaaaatataagctttcttataactttgatgttgagatagatttcagcaaatgtaatgttatttggatgaaagagatcttttcagttttcaccctccaatttatcatgcgccgcttgcataaagacgggtccattccttagctgcacagatatagttcacaaggatgtgagatactaacacaacgtttagaaagaaagaaagaaagaaagagtagaaagatattgtaacaagtttaaattcagtgttaaaatcacatcacctgtatccacagcttctgcctcattactcttccagtgcttagcaatgttctcagaaagcggatcatctgggtttggtgcactcagaagagcttgaatactttataaggattgcacacgttaataaaataggagcagaagtcaagctccaagaaaccaatagtttttagcaggaaataatcttatgtaatcagctcatataccttaagagcactgttcgtatttgtagtgcagggctccatttgtccttgagaatatcaagacagattcttccaagctgctcaaatagacacaagtttaggagcatgtctttggttgtgtggatgacaaaggaaaaagaggagggatttggaacagaccttgtcaatgttaggatggtatatctttgtgagaaacctaacctgtaacagattaaatcattaatagagtcattagagaatagagaaatgctctacacaaaccatttacaaaaaatcaaacgttcaagaactatatccatatgaaaagagaaacaatgacaagaaatatgacattacatgtacgtcactcataatccaaccagaatcatggatctcagagaccatttggtatgtgtacaaataaataccaaaccaatatattcgcttaataactagattcttatagctgacactacttatagtcaaatgacttaccttgggagctgccatagggtattcttcaggcaaaaagagctccaacttgaaaactcctcctataagatggaatctatcactcagtaaaaagttaaaattttaagagagagcatattcaaaggagaaaaagaaaaaaggtacaagttttaaacttagcatctggtacgcaacagaacaaatcgaatgtgttaataataaaactaagtacagttgtgtatgtatattcaggactatacttaacactagctagtgtcacaaacaagatacaagagcattagcaatcattgcttgacataaacatgttgtactctcaaagcaaaaaatctaatactcggattatcagaagactatttgactaccttcataaggtgattgtgtaggaccaagaatcataacgttgaaataccgcatattatcctcagatggagaggcacttataccgggagctgcaccaatcaaatcaatcgaagttataatcagatttaaatcttactctacaaccaaattccaaactccatggacggtcacgtctcggatccacaattcaaccatcaaaattgatattatcatctcaaaatcaacactataactcaacaaggcaggacgaattaaagagttttttacccggttcactgagcagacgttgagtttcctatcagatcgcaaggaaaacaaaagttaagagactccgatagaaacagagatcggtagagtttgtccaaggaatcaaatcgagattggaaaacaaaccttgatgattcttcgcggcaaattactgttggccattatcacttgtcgatcgagctcagagagttagggtttttgaagggagctgctgatgataatcgagaacaacaagttcgtcgtcgtcgtctctcgaatctgacgaagattttaattcgatttcctttctctatctttaaaattcaactctggacgaatcaaataatatattagcttttattttacgtattttcccgcaacctttgtttattgctaaccctccctaaagttctacttatttattgatttttcccaacagttttcgaatattacatagattttctcagatttccgggcttattggtccatcaaagccatttatatgtgaggcccatatttattataatggaccttaaccaaatccagtttatccattaagcttgtcattttatattggacttgtaaaactttaaacatttcattgggttgggccgatctcgaaagcccatcaagaataatacgactttaaagtagcgaactaggtagtaggttcactgtgagttagccgttgaggatgtcagaacggtaactatgacgtcaaaagctgagaattcgaaaactatccgttagtgattttacccaacggtaaagaaaacttgtctatatatagtaatacacacaacacagtcctcgttactcctaaattatctaatccaaaccaagacatgtagatagaaacctattctctttttgtctcttgttgtctgattctctcttcatcttcggcggcaaaactcagccaatcatcggtgagttactttgtactttactttacggtgaaaagcgaaaactgtgtctatgtaaaacctttgtacattacctttctgtctctatgtactttaatttccagtttctttcttgttgtattgtttgggtgtttttagtcggaattactcttcttggctcttagtactttgttttgacccatgttggattttgatttctatgttattcgtattgttgatacttcgtttaaaacttatatgttgacaaatgaatacggtgcaatgccttaatttaaaccatgaatcttttattttcgttattatttatttgataatagtcctaataatgtttttaatcaagatataatattttttgcgagggatcattaattctgatgaggaggacaaagcttcaacaagcgaacaacaatatccactacttagagagctaaagcataaacatgaattgcaatttccgccaggttagttttcaatcctttccaaaaatcaactactatcaataataattgaagcactttttagtcgaaatactcatcactcgaaacactttctagtgtaaactttttaattctactttaataacacactcataaacactatatcatttagtagtaaaacactcagtaactaaaaaatattttcttaaaaaaagatatgatgcggaacttttaattaaaactcacaactaaaaaattaaaatagttgaaacatacttagtaaacaccaaattattttcaacaaaaaatagtcaaagtcgtagcactgaaccattcaaccaaaaaaaaacacatttaacaagatacacacacgactaataaatgtgtattttcttacgtctttaaaattacattaacacttaattaattcaacaaaatccctttagccaaaatttagtcgaagcacttactcaaaaaacttatatctaaatccgaacacacgtaaaacactagatcaatttacttaaaagtcgaaacatatatttccaagcatacttctaaacaaagcatacttagtgaagtacattagttatactgttgaacacaatattaaatcacgaacacgtactcctaaactagtcaggcaaattactcctaacattttagtcaaaacatagttattcgtaacacttgaaaacacttccgcaattccgcatttaaaggcaagtgcaaaaatcacactttatttaaaaaaagcttatataaaaaccgttttaggcgaagtatgaatattacttgaacaattattgtttttacttcacatttcgtcgaagcgtctgttagtcgaagccaagcacaagttgaaccactgttagtcgtatcgctgttagtcgttagtcaaaacacttttttatgtcatacattttgtacgttgttattaaatgttaacttgatcgggaaaagaccactctgttgcaggtcgcacacctttaacagtgatctaatatatcaaagacaaaaaaaaggtggattgagattaatcataaaaggaaacaaatactttaacaacttctcaaaaaaattggtgatcaaactcagaaaactaaaaattggaacatagcaactgaagaaaatgaaaatgaggatctgtttcgcatccatatttcgcaaactcattaaaacgttaattaattttaaaataaccaagtgtagataacgcagcttatcggatccgttggtataacgttgtatggtcctcagtttggaaggagtggcgattttccgaaaatggattgatataaggcaaacagattggttcagagtaatttcaaaaaaatcaatgaaacggtatatgaaataatgtacttaaaatattatatcaaataggctatctctatgctcacatcacatgcgtcgaataaacaattaaaacaaaaatccaacgggacgaccaatagcataattccggtggctcgtaattaaaaattggtccacattatatcaaagtgctcacgtaccctttcaaaattccaattccaactaatgttgctgtggtgctacagaaataaataaaaaactatagttgaaaactgacaaaacaagtataattaatattgactcgctttatacaagaaacatgttactttgtacaaaacaagtataattaatattgactaaaatgaaaattatcactttatacctgttaagaatcgatagattatcatacaagttgtttcaaattattatacaagtttgtttcacttcactttacaccgaatagcattgataaattaatatacacctgctaaagtgacgaggtttcaaaagcatatcattgcatcctataaaaagaagctcactcagtatactaaaacacaccaacattcatcaaaaaaacacataacaaaaaatggaattctcaaccacattagctctgttcttcactctctccatattcttggtcggagcacaagccaaagttcccgtcgacgaccaatttcgagtggtcaacgaaggaggctacaccgattacagtcccatcgaatacaaccccgacgtacgtggcttcgtccccttcagcgacaacttccgtctctgtttctacaacacaacccaaaacgcatacactctcgctcttagaatcggaaacagagcccaagaatccactctaagatgggtctgggaagcaaacagaggctcaccagtcaaagaaaacgccacgttgactttcggcgaagatggaaaccttgtacttgctgaagccgatggccgcgtggtctggcaaacgaacacggctaacaaaggcgtcgtggggatcaaaattttggagaatggcaatatggtaatatatgattcaaatggaaaattcgtatggcaaagctttgactctccgaccgacacgcttctcgttggacagtctttgaaactcaacggtcaaaacaagctcgtaagcagactttctccatcggtcaacgcaaacggaccgtacagtctcgtgatggaagccaagaagctagtcttgtactacacgacaaacaaaactccaaaaccaatcggttactacgaatacgaattcttcaccaagatagctcagttacagtctatgacgttccaagctgtggaggatgccgacaccacgtggggtctacacatggaaggtgtcgactctggttctcaattcaacgtctcgacgttcctctcgcggcctaaacacaatgcgacgttgagttttcttcggttagagtcagacggaaacatcagagtttggagttacagtacgttggcgacttccacggcttgggacgtaacgtacacggcgtttactaacgacaacactgacggtaacgatgagtgtaggatccctgagcattgtttggggtttggtttgtgtaagaaaggtcagtgtaacgcttgtcctagcgacatagggcttcttggttgggatgagacttgcaagattccgagtctcgctagttgcgatcccaagacatttcactatttcaagatcgaaggagctgatagttttatgacgaagtataacggtggatcaacgacaacggagagtgcgtgtggggacaaatgtacgagagattgtaagtgtttagggtttttctacaataggaagagttcgaggtgttggttgggttatgagctcaagacattgactaaaaccggagatacttccctagttgcttatgtcaaggctccgaatgctagcaagaagtcagctcttgccatttgaagcgtaaacaaaggtttttgtgtgtcgttttgacgaataataaggctacgttgtcctttgttttctcttttctgaaaaagtgttgctattggtttatcttgttttatgattgcatgttgattctcaagctacaccgtaataaattgaagtgaaacgcatcagctaaattcaattattctcattattttaccaaaaaaaataaaattattcattaatttagtatcatcacaaaatatgatatacttaaggattgaattgagaaattgaatcatgaatgagtttaagctttcatgttttctgtttttcttttttttttagcttgagaccatattttgaaggtaatgtttcaagaaaaaccttaactttccgttgtgaaaaaatgttttatatttttattagacactgatgcaatgcagtagaacgtgcacacaacactttgcttctcatgacaagccattgaaagattcaaacttttaatttggattattaaagaagcggtataaatatgatacgaataagatgcgtgctacggcgcttcgacgccgcgtcaccttaacagagatggtcatctgtctcgtttttttttgaccagtcaacgctcttatatatttattatacatgtacataatgtcttaaatcatgcagactaataactttacatcgttttcgttgttagctttgatttttaaaagtcaacttgaaagatgccaggtgttatttatagtttatacatatcaagcaaatgctttctactgcatatattatcgattttttttacccaaacataataattaattattgaacaaaaggtacacagtacttaacactaatcttcatttttcttcattttgtgagctgatttggtctaattaaatcgatggcataaaagccaaaaccagagaaacattgtttatgaatagaaatttttagaggtaaaaatttagcatttggaaccaaagagtcggttctaatataatgtataaagaacgaaaaataaacgatagaaatattaactgaacatttagtatgacggtttgggactttggggtgacaaattgttgtactatattgagctgcccataagcatttgtatttgtgaaacattgcatattaattggagctgaagtatatacatatgcatagctatgagttaatttttctacctcgtctcgagacaatgcattttgaggtgatttggttcccaaatgatgccgctctaaaaaggctaattaagaagtcaaacttattgttgttttgttgatgcctcacgggaatcaccagatatgaaagctaaaatctgatgataaatgcataacaaacaaggccatcaaattattaaaggtagttcttcaatagaacccacttcaagcaaaaccagtagctttactaatggaagttcaacaagccagaaacttgggttattatgaggtaacgtttgttggagatggcaaagcttaatttgtatgattgtcaccagtcaagaaaaacacagggctaactgcaaaacttctatcaaaactcttgccaaagacatcgtatctctttctagacagcatgtaattatatatatatgtacgtggaaaacaaacttagtaggagtgtgtacaatttagctaagtatgattgaatacattctacaggacatgtagtaacttggaactagttatattttctttcttgtgtaataagaagatttgaggacaaaaaaaaagatgctaaatacaagttggcacatggactcggaaaagaataataaaatgttgccaaaagtaatttaaaacaaaaatagctagccgtcgaataagacctgtgcccacacacacctggcaagccgccgggtattgggagttgggacacatgaccacaccaaagatccgatctagatcatttacattagataattatttatccatggtccgtttatttttgtaaaacaccttcaaatttctttattaacaagtggtcagaatagttcagattaatatcagaaagacaattaactataaggatagataaagttgcatgtatttgaatcatatatcaaattctatctgaatcatatatcaaattctatctataatctatgcgaatgcgacgtgagtcaataaatattaaagacaaatccaacgagacgagagaatcgactatgagcatcttccaggtggctcgtaattaaaagttgttggtcggtgggtcctcattcaaacgagtgatttattatttcgttcgattcaatacgcaactctagtaatttcaatttaactaatgctgatgcagtgtaagaaagtatagttatcaaccaacaactcgctttgtaagagaaacatatcatacttttgatgatactattttttcttttttgaatttcacaccggattcaatcggtaaagtattatagaagttcttactgaaacaacattaatttttttgtaaaatataaatctaagaagaaaaaattactagggaaattaatagcaaactgtaacggttgactggttttgctaatcgtgcacggtttagcattgagattaagataagctctttctaaaatattcgaaacatatcctttaaaaaaaaaaaaaaaaatcaaacaaaaccagcaaaagtaatagattatagcgaaacaaagaccaaaaagtcgttcaaaatactctttaaaatattataaaaccaacaaaaaaacaaagacttccttggctcctcctataaatagaagctttctctctttaccagaaacacaccaaaatccattaacacacacaaaaacaaaatgaaattttcaatcacattagctctatgcttcactctctccatcttcttgatcggatcacaagccaaagttccagtcgacgaccaattccgagtggtcaacgaaggtggctacaccgattacagtcccatcgaatacaaccccgacgtacgtggcttcgtacccttcagtgacaacttccgtctctgtttctacaacacaaccccaaacgcatacactctcgctctcagaatcggaaacagagtccaagaatccactctcagatgggtctgggaagcaaacagaggctcaccggtcaaagaaaacgcgacgttgacttttggcgaagacggaaacctcgtactcgctgaagccgatggacgcttggtatggcaaacgaacacagctaacaaaggcgccgtggggatcaaaatcttggagaatggcaatatggtaatatacgattccagtggaaaatttgtatggcagagctttgattctcccaccgacacacttctcgttggacagtctttgaaactcaacggtcggaccaaactcgtaagcagactgtctccatctgtcaacacaaacggaccgtacagtctcgtgatggaagccaagaagctagtcttgtactacacgacaaacaaaactccgaaaccaatcgcttattttgaatacgaattcttcaccaagataacacaattccagtcaatgacgttccaagctgtggaagattccgacacaacgtggggtctagtcatggaaggtgtcgattctggttctaaattcaacgtttcaacgttcctctcacggccgaaacacaacgcgacgttgagttttattcggttagaatcagacggaaacatcagagtttggagttacagtacgttggcgacttccacggcttgggacgtgacatacacggcgtttaccaacgccgacactgacggtaacgacgagtgtaggatccctgagcattgtttggggtttggtttgtgtaagaaaggccagtgtaacgcttgtcctagcgacaaagggcttcttggttgggacgagacatgtaaatctccaagtctcgcaagttgcgatcccaagacatttcactacttcaagatcgaaggagctgatagtttcatgacaaaatataacggtggatcatcgacgacggagagtgcgtgtggggacaagtgtacgagagattgcaaatgtttagggtttttctacaatagaaagagttcgaggtgttggttgggctacgagctcaagacattgactagaaccggagattcttccctggttgcttatgtcaaagctcctaatgcaaacaaaaagtcaactctttgaggtctgaaagtcatatatatatatgaaattattgtgttgtgtgtttaataaggttcgtttgtgtacctttttaaaaataaatggtgtactgattctcaagataaatcctaatacaaagtgaagtgaaaggaatcaatttctgatatatcttaccatccccaatggttaagaagtaattggttcttaaccaaacatcttaacaattatttatactaaaattttaaaacatgacatgtaactgtttttttcactcatgaaaacttcttagctaagaagcaaatcttagtttttaaatttattttgatttaatttttatagtttaattttaagatattattctaagatacacctaagatacaccattggaggtgctattactcccacaatttctttatataagattttttgactaaaaacagattaataaactattattttgtgcatcatgaaaactagttcaaccaatgaaaataaatactgcataattcttgttctaatgacagattttaaacatttctgtattcccaataaatacagatttaatttagaaacttgaaacaaacaaaattgtttaaacatcttacaaataaaaaaaaagggagtgagtaattcataaaatactatgctttgtcagtaacgcagaagacccaagtgcacgtaatacatcagaggaattaattattgattgtaaagattattgtattgaatagttttgttacgtagctaaatatttcaaaattaaagatgggatcgcgaatttgcaattgcatcatggtcgatagaataagatgcgtgatacgatgcttcagcgccgcgtcaccttttcggctagttttttttttttttttttcatttacaaagtcggcttgcaagctgccgtataacagaagtacatgttaggattttcatacatgtattaataaatcatattttcagttaattgggcctgtaggacacgttttagcccattaatatattcctcttacgtttcaaccgctttcccaaaaccaaaaaaaacttgaaagcgtcgccaccgtcgtcaattatccgacgatctctcatcgcttcgcttttacatcgtcattatctgtgatcggatcgcgccgctgcaggtcagttctctcgttgttcttcttagtctctctactatgaatttacttaacttgatctgtgcttttctgcttaatttttcagcattacatcattgctgaggtctctaaacaaaagcgtcacgattacaaaagacgaaatcacatggaaaacaaagatttgattagccaattattgccggaccacgtactgcatgagatactcctaaaacttgcgacgaaagattctgttaaaaccagtatcttgtccacgagatggagatatatttggcaacgtgttcctggattggaccttaaccaaactaacttcagatacaaggggttaaagggttttgtcaacaggtttctagatttggataagaaatcactcatataccaattgaagttggaatttgacggcaggaagtatgagactgaaggatcccttttcaacaagtgggtcgactcagtggttacccgtggagttcagcatcttgtggttgttgctaaaatatttggttcttgcataagaacaattattgtcccataaaacttccgggaagcatttctatgtgtgaaacattggtacacttgaagctggtcgaggtaggcattgatagttttgactccgtttctctacctcgtcttgagactatgcatttactatcggtttggttttcgagcgaagcggctctagagaggcttatctcatcctccccagttcttcaagttttgtacattgaaaaagtttggaatgtggaagttatacgagtgcggtctcagacactatatagcttgagaatgcgtatttggaaaagagatttagattggaacaaagatttaacaaaaattgggctagtgattgatgctcctaggcttaagtctctgaatcttcaaatccaccggtttaaagaccttgtgctgaatagtgtatgttctccgctcaaagtggatattagtatctctaaaggagagtttaatcctattaactcattgacgatgaaaacattgcgtacatttattgcttggatatcaaatgtcacaaatcttgcactcaattactgttgtctagaggtatgtatatttttgtaactattcatcctgaattaatctgtctcgaaaacttattactaatttattcttcttggtttttgctaggctatgtatgcttactctagctcggaaccattgcctcagttctctaacttaacccatttggaagtttcgatggactcctcttgtttaaagttgttaccaacgtttctcgcaagctgtccaaacctaaaatctctagagttggtaattttatttttataagtaactcttgaattacttaactaaactatacattctcattacgtttttcgtttcttgtccttgatattatgtagtgggttcacgatcatcgtctagatatattggatatctcaagatcaactatgcctaagtgtctgctaatatcgctcaagtttgttacgatatacagcacagctatgatatccagctcggttgagaatcaggtcgaaaccgagcttgtcaaatacatcctggggaatgcagcagttgtcaaggagcttactcttcgattcattttatgggcagaagaacacaggtttcaacttagcaagcaaatccttgcgtttccaaagctttcttctgcttgtcaagtctttcttcattcgtcgtttttttgaacttgttgtgaggatcaagcacaagtgtaaacgttatgcttcttaggtgtttttagtttccacacttgttccggttagacatcgtaatttttaaaaattttaagatttatgtgattggtaaattcaagatgccgcaatattattgatatcgtagatatctttgtcagccattatttgtttgggtttcgtttggtgcacatgtaaagaataagatacatggatctctgctacccatagatacgtgtacttaaacttttaaatgaaaaagccaaatcttggcccctcgcagtggcatctaagaaaaatccacaactacattttttcttcaaaacttaactaaactcacagcttcaagtctattttaccaagacggtgctgtgatattttaccaatcctcattatcctctcataggcagaaaatccggtttcaagtcttctagaaaatgatagtattaagataaatgcataaaaggattaatcattttctttcgacaagaaaataaattatatgatattcagaaagcaaaatagttatgacgaatattcgataatctgcactagacaaaccttatccaaatcataagtcgccatcggctccattgtacagcaccaatttgcttgatctcttcttctttaattagtcaagtcgcaattagcaactttgacttttcaaacgaatacggccaatattacaaagctaaacaacttatatataccacaacacaagatacatcttctacataatcatctcactcctttactcacacaagaaaacaaaatcatgtctcgatttgctatcttagtaaccttggcacttgccattgccactgtttcggtggttatagctcaagtccctccggagaaacaattcagagtcgtcaacgaaggagaattcggtgaatacatcactgagtacgacgcaagttacagattcatcgaatcatcaaaccagagcttcttcacatcaccattccagctcttgttttacaacactacccctagcgcctacatcttagctctccgagtcggactcaggcgtgacgagtctaccatgcgttggatatgggacgcgaatcgcaacaaccccgtcggagaaaacgctacactctcactcggccgtaacggcaacctcgtcctcgctgaagctgacggacgagtcaaatggcagactaacacagctaacaaaggcgtcaccggattccaaatcttacccaacggaaacatcgtcctacacgacaaaaacggcaaattcgtatggcagagtttcgatcaccccaccgatacactcctcaccggccaatcgttaaaagttaacggagtcaacaaactcgttagccgtacatctgattcgaacggctcagatggtccgtacagcatggtgctggacaaaaaaggtttaaccatgtacgttaacaaaaccggtacgccgttagtttacggcggatggccggatcacgatttccgcggcaccgtcactttcgccgttacaagagaattcgataatttaacggagccgtcagcttacgagcttctcttagaacccgcaccacaacccgctacgaacccgggtaataaccgccggttactccaagtcagaccaatcggaagcggaggaggaactttaaatctgaacaaaatcaattacaacggaacgatttcgtatctaagactcggatctgacgggagtctcaaggcttactcgtatttcccagcagctacgtatctcaaatgggaagagagtttctcattcttctccacttacttcgtccgtcaatgtggcttgccgtcgttttgcggcgattacggttactgcgatcgtgggatgtgcaacgcgtgtcctacaccaaaaggattactcggatggagtgataaatgcgcaccacctaaaacgacgcagttttgcagcggagtcaagggtaaaactgtcaattattataagatagtcggtgttgagcattttactgggccttatgttaatgatggacaaggcccaacttctgtgaacgattgcaaggccaagtgcgatcgtgattgcaagtgtttgggttacttctacaaagagaaagacaagaaatgtttgcttgctcctctgcttggtacacttatcaaagatgccaacacttcttctgttgcttacatcaaatattagtgtttttttgggaaagttatttaccgaattctttttgaattcttagagatttaatgaataatcggtgtgcttgtaatgatccaccgttgaatatattgtattaccttaaaaaaaagccatcagatgtatttactatatatatatagtacctttgagaatcaaaataccatgtgaagcattatcattattttgttgcctctgacaagagttttgtagtccactggtcctccacttggaataccgctcacttggttcttaattcaattgactactgaggtttgtagatggtcgttgggactcatactgtcaaaagaacagcaaaaattttgtcacttctccaactcattgggcctttaggctttgtcatagcccaataattctatcttaatcggacaaaccgtgtggtccacttcccttcgtacatattttttacaagttttgtggtcttactttttactttttagcattacatgggataaaaagtgaaagcttgcccagcagctatgcatccatcaaccatcaaaatctgactcacagtactgttttggatgtctgaacttacataaaagattcgatcatcacaagatgattattgtgagttttaatttttttactgttaaagctggcggagatgtttttatatctgttagcattatctcggaaatttgtatatatatatacgacagtctagtggcgggtcagataaaggtggaatgtgtagtctagactttagaatatataaaattactttatgaagtatatttacatacaagacggtaaaatcgagaaatttatatagctagtttgggaagtgtgggtacttagttatccaaatattcactaatttgagtagagatcaaaatggtgatcgggtagattgcaatcttgaaaggatttttagatatatttttacagtttaaagtatttaaacgagtacattctatatttaaaaacaagtgtttaaagtatgaatccgattggagaatctaaattttcttttgtcaaaaacgatggtcaactttgtctgaacaattttcatgagattagttatacaaaatttgtgtaataaaaacggattaacaacaatatatataattagtgttttactcacaacttttgtatatacgataattttcgaaaattctcagtagacatatcttatccaaatcataaatgagccattggttgatctgtataacgaagacacgatttgcagcttaggaccattcaaaaaaaaaaaaaaaaaaaacttaggactttcaaacgaatacagcccaacgacccaaagttaagatcttatatatacacctaaaggatatagaaaatcatctcactctactactcaatctcagtaaacataaagaacacaaccatgcttaggtttgattacttactaatcacggcacttgccatttcaactgtttcggttgtcatggcccaagtccctcccgagaaacaattcagagtgctcaacgaacccggctacgccccatacatcaccgagtacgacgcgagttaccgattcctcaactcaccgaatcagaatttcttcacaattcctttccagctcatgttttacaatacaactcctagcgcctacgtgttagctctccgagtcggaacgaggcgtgacatgagtttcacgcgttggatctgggacgccaatcgcaacaaccccgtcggagacaactccacactctcattcggccgaaacggaaaccttgtgctcgctgagttaaacggccaagtcaagtggcagactaacacagccaacaaaggcgtcaccggattccaaatcttgcccaatggaaacatggtgctacacgacaaacatggaaaattcgtttggcagagtttcgatcatcccaccgatacactcctcgtcggccaatccctaaaagttaacggagttaacaaactcgttagccgtacatctgatatgaacggctccgatggtccgtacagcatggtgttggacaacaaaggcttaaccatgtacgttaacaaaaccggtacgccgttagtttacgggggatggacggatcacgacttccgcggtaccgtcacgttcgccgttacaagagagttcgataatttaacggagccgtcagcttacgagcttctcttagaacccgcaccacaacccgctacgaacccgggtaataaccgccggttactccaagttagaccaatcggaagcggaggaggaactttaaacttaaacaaaatcaactacaatggaacgatatcgtatctgagacttggatccgacggtagcctcaaggccttctcgtatttccctgccgcgacgtatctcgaatgggaagagactttcgctttcttctccaattacttcgtccgtcaatgcggtttgccgacgttttgcggcgattacggttactgcgatcgaggaatgtgcgtcgggtgccctacaccgaaaggtctgttagcttggagtgataaatgcgctccacctaaaacgacgcagttttgcagcggaggcaagggtaaagctgtcaattattacaagatagtcggtgttgagcattttactgggccgtatgttaatgatggacaaggcccaacttctgtgaacgattgcaaggctaagtgcgatcgtgattgcaagtgtttgggttacttctacaaggagaaggacaagaaatgtttgcttgctcctcttcttggtacacttatcaaagatgccaacacttcttccgttgcttacatcaaatattagcgagatttataaaccgaaaccaacgtgaattctcatagatttaatgaataattggtgttgttataatgcttcaccgtttttgttttcgtagactcgcgtattatgctcagtcctagtcaagtatgatattatcaaaataaaaatggatgatattgatgttcttcagattatcaaaattgaaattaatagtcgatcattataatgcgtcctttatacaatattcaattaatgcttttgttttgtataaataacaatgagacaactcgatattgttgcacatttcataattttctgttggttaatgattatgccgtgggaccattttttctatgcatacgactgattactgagatttttcttttcttggttgaatgagtatctgcaggaaaattaaaaactcaaatttataaaaaattaggaagaatcatatcctaggagagtaggtaggtaattgttgttttaaatataaacaaagggaatacttcttttaaccacaaaagttatgctatcattttagaaagaaaaaactattcaaccaacccttgaataatggatattcacctagtttattagaaattttctagtaacgattggtcagtgcctcagtggcagccaaaaaggaatatccttaatcttatttaattttgacaacaaatatttaatacactccaataacattagaattctgtagatgacaaaactttaaataagtaaatgcaagcgtccatcgcggatctttgggattgggacctccatagatttatttgtctggttctatttgagagaatcatatttacaaaatttaaggtccattgggctttatttatgggcctattaattatcgatttatccacattcttcttttgtttggttttcatcgtttccaatttccatgcacaaagaaaacgctcttatacgtaaatatattggtatttctactagatcatactttatactttatgtgttatttctccattccagtattattgtttttcttttgttacgcatcataatagggcggcaatattcgttgacaatgattgctaagctgaatggaaacataattacaattttaatagcaacaaatatatttaaataaagtaaatagtaaacaatacttaaatgctaatcgtacaaattaaaggaagggaaaataatttgataggtctactgattgaaaaagaaagaactaaagcactcttgctggccccatcccctgtctccctcatctatcacttaacttgataatccaaaaaatatcatatacttaatttgcatttacttaattagtttaattttatatacatctacgttttaagtttgtttggttcgaaataattctgaacagcaatcactttactttcaactaaaaacgaacttggttttaaaaaatgatttatatattcgaggttgattaattatagaacactagattttgctgaaaatgaaaataaagtaatagaacactagctttcagtttttttgtagcccttatagatttgatgctacgtgtgtgtatatatattattcccatcaaataatttacgcgagaatataataagatttaattttctaattagtgtataaaattttctaaagttttcccccaccatcattgacatagtttctctatattcccctcttcttctcctttcaagaccaaaagaaaaaaaaaaactttttcttttctgatgaatcgtatctattagctatgagcctgaggtgatgatcatgtcaacataaccatcaacgttctaccatggctagtcatagcaacaaaggcaaaggcatagcagaaggatcgtctcaaccgcaatcgcaaccgcaaccacaaccacaccaaccgcaatcacctcctaacccgccagcgttaagccggtacgagtcacagaaacgacgagactggaacacgttttgtcaatacctgcgtaaccaacagccaccggttcacatctcgcagtgtggatcaaaccacatcctcgatttcctccaatatctcgaccagtttgggaagacaaaggttcatatccatggatgcgttttcttcggacaggttgagccagcgggacagtgtaactgtcctttaaaacaagcgtgggggagtttagatgctttgatcggacggctaagagcggctttcgaggagaacggaggattgccggagagaaacccttttgccggcggcggaattagggtttttctgagggaagtgagagattcacaggcgaaggcaagaggagttccgtacaagaaaagaaaaaagaggaagaagaggaatcctatgaagagtcatgatggtgaagatggtactacgggaactagtagtagctccaacttggcttcttagcggaagcaaacaaaaaatctataataaaacaaagtggaattagttaatggtaagcatttaatactctccataatctctattaattttcagtactttaatcctattttgtgatctatttacaattttacatatagagtgaaaagaaacaattctacattcgtttcttgatagtcagctcttaatgcatagttgaattttatacgtatcatacccaaactataagattaatcttgatcttagatcatatacatatatcatcatggtgtgtaccctaagtttcataatcatttttcttaactatttatgtggatattattactgtactagataatattttatacagcttaaattaatatgttcattaattttacctcgctgtaaaccctagctagagagtatacaatatacatatacacacaaatggtataaaaccctagttttggctcagatgtaagtgtgtgtatacaatcatgcatcgtgatatatgcatctatacatgaatgcataggcgtatacatttaattcattaatgtgaatatgaagggaattacatcgatcagatgttttaggggtttagtttctgcggtggggcttcctgtttaattaagctccggggatattgtgctccttaattaagtgtttacgaatgctacaattttttttgaaatggttataaatttttattaatctatacatgtataaatgtataaaaaagatcaatgctagctaaaaagtttcactgactaacttttgtttcatattttaactgcattattccaattattgtttgcataatagtctactagtttgcaaactaggcctattgcttaacacagcgttgtaagttgtaacgttataaatcgtgtaaaaaaaaaattgcatgtgcactagactatgatatatcacgatgcatgatttacgcttttgttccacaaatgttgattagtgcgactatattaatcttacacataagtgtcataagacacatacacagactatggacagaccaaactaagggtagaaattaaaaaagtttaactcgaaggagagacgacacatcgaagaagtgtggacgtattgccggagaagaggcaaacgattgaagaagtggggctaaagagtttagaaaatttgagaacatgtaatgtagtaaattttacaatattgtggcttacctcttataatgttttttttccccataaagtttcgattgatcttccatgtcaattcgtatctaaaatgttcttcagagaattagaggggggaggggggggggattatgcacagtaaaagttcagggatcagcttgttaaaaacagagattttggggtaaaagttttaaaacgttagaagttttgggtctaacttgtaagaaatcagaggattaggtgaaaaacataataaagtgaaagtttaggcgttaaaatgcagtaaatggtaaattgttaagagaaaagagatctaaaataatataaaaagtgaactctaatgacaaaaacggaaagcttgaagttcttcttcctcatcggaaaacaaacaaagaatgatgaatatttacgacgatgaatctctgaagcaagaagtaatctaccttcactccctctggcatcaaggtcctcctacccgaaaaccaatccctagccctaatttcaacctgattcacgacccgattcaacgacccagaccgaattacatcccgccgtctgatttgcaacttctctctcgctatggagctgttactccacagatcatatccagaaaccctaataatcctcaaaatctctacaataacaacaaacgtcctaggcctgattcgggtcgagaatggcccgtcaatgacgtgcctcagcctccttctacgggatctggatggccggaatacaggccgtgtaaaaagactcgacctatttcggccgaggagaaagagaaattggcggcgaatatgcttcagagagatatccatcgcacctgtcgcgagttcttcggtcgaaaatccggtgaagaagatagctcagtcgccggaggagatgaatcggaaatcgatgaaggagacgaagatcagtctttggagaaagaagaatcttcttcttccaaggagtttcagtttctatcgagagtttttgaagagaatgtgaagttgaaggaatactatgagaagaacactgggaatggagagttttggtgtttggtttgtggtggcattggagagaaaagttgtaggaagttcaagagctgcttagctttaattcagcattcacttactattcacaagacggatttgaaaattcagcatagagctctcgctcaagttgtctgcaatgttcttggctgggacgttaacaatccagttgtttctagccaaaaagattctcaggttagtttcgatgccttgaaagaagttagctttcaactattgtagtctatggtttcgaaaaagatgattgatttgcttgtgggaattcaattaagggccgggttatagtttgatagttcaggttactatctggttataatgatcaaagacaagcttatcagtttatttatgttgttctgagggaaggttttgatctgattaaagatgaatttgctggatcattgtgattcttgggaggtttcttgaataattctggtcattcagaaatacttaacttttttttttgttattgctcttgatagacggttgtggaaggtgcatctgagccgccttcagactcgaagattcctcaggagaaacaacaggtcatgtcggttgaagaacacgcaaaggctgcggtgttacaaatgcaacagaatgcatcagaagctttgaaagacatttttgtcaaggatggtactggtgcagctgatggaactgaggagaacggtgatgagaatctgtctgaggagttggagttaatatctaaagtcttctccgagaatgttgagctcaagagttactatgagaaaaactatgaaggtggagcttttatctgtctggtgtgttgtgctgcgactgataagaagatgttaaaaagattcaaacactgttatggagttgttcaacattgtactaaagtaccaaaaatgaaaatacgagctcacaaggttttcgctcagtttgtctgtgaactacttggctgggattttgagcttctaccacgtagagtaatgaaaggcgttgcttctcttgctatatctaatgctaacgagaacaatgagaacacatcatccatggtcgaggtgagaaagcataccaagagaacaagcactctcttatatcttgttatttcacaaattaaattgtgtgaatcatttcaggaacatatgtgcgaagataaagctggtaacccacaggacaacaatgaggctgaggcatgcgttggttagtgtacatgtctacatgattacatctaatttcagtttttgatatagaaccttggttagtgctttcagacattttaagctgcttgatgattttttttaaagtttgatgcaattaaccagtatatatgttttgtctacgccgcagaggcttaatcatattgtttctcttctacgtattcaattgaagagtcaaagactcaagaggcacaaagttatgtatatggaaggcactaaatcttcaggtactattatttagttttcggcatgttatcaaacttctcacgacttggtaatggagtcatcaatgacaatatgtattagtgtactcaacttttgattctgaattttgattagttaaaaatattctgttcttttctcactgagaattttggagtattcaaatcaaagtttccatactttggagatagaatgttgcaagacacagactaaatcatatatttacataaacatttgttcccttataaatatacagaattcaacatttcttttcagagaaaaataatgaacgtcagaataaatattcagtgatattaatttcgtgatattaaataatttaatcacctgttgggctatctgggccgaacaattgtgggccttgagaaactctattaacttttccgtttttaatccaatctgtccaagacgggcgggtcaaatatcttttgacacctctaaaaattgttcacggggaaagcaaacagaagaacgtaaaccagtcaagtctgtaaatggcgaaaaaagaaggttcaaagatgaacatcgccattatacatccagatcttggaataggtacgatcttcatcaattgttcgattttgatttccccctgattagccttcttcctctcgtataattggtctttcttctgcgatctatcttggttccgaggagttattaccaacttcaaagagtaaacgcaattgagagatcaataactagtttaacagactttgatttgatacacggatgaataagtcattatcttctcgtttggatctcacaaatttacactagtgcgttgtttctggtatatgcaggcggagcagagagattgattgttgatgcggccgttgagcttgcctcgcacggtcataaagttcatatcttcacctctcaccacgacaaatccagatgcttcgaggaaactctttccggtgagtgacgattttacttgatttcagaaagatgtttgctttgaaagagctatctactgagagttcagattcttgacactcaatttatcatttggttttagaatattcttcaaatttgtaagctttataagatcacggtttgtgatgtatgattcatgtcttaacaactatccaggtatctttcaagttacggtgtatggatctttcctgccacggcatattttctaccgactacacgcagtgtgtgcatatttgcggtgcttgtttgttgctctctgtgttcttttgggttggtcttcattcgatgttgtactagcagaccaagtttcagtcgtagtcccattgctgaaactcaaaaggtcatctaaggtattcaaattttgctgttagtcatcatatcttctgctcactatatacaacaacttaattttgaccatatgtggatataggttgttttctactgccatttcccggatctcttgctagctaagcatacaacaacacttagacggatgtatcggaaacccattgatttcattgaagaacaaacaacaggtttggttttcattcatttcctcttacttacatccatctgacatcaaattattcttatttatcacttgtgggattgtagggatggctgatatgatccttgttaacagtaacttcacggcatcaacatttgccaatacatttaaaaggctaaatgcacaagggagtcgcccagctgtactttaccccgcagtcaatattgatcagttcattgaaccccacacttataagtattgtatatccctgaactccaaatttccaggatagaaaagcaagcttccatattgcaaattacttctctgtcggtttctataagttcttctcttcttctttgtctcaagcaggttgaatttcctctccataaaccgctttgagaggaaaaagaacatcgatctagctgtttcagcttttgctatcctatgcaaacataagcaaaatctgagtgatgttacccttaccgttgcaggcaagtgtattattattcatatttcttcaataatcattactagatgaagattttactgtttgtgtgtatcctaacaaaactctgttattcaggtggatatgacgagcgattgaaggagaatgttgagtacttggaggagctcagaagtttagccgagaaagaaggagtttctgatcgagttaactttatcacatcttgttcaaccgctgaaagaaatgaacttctctcaagctgcttgtgcgttctctacacccccacggtaaaagtcaccatccttttttttttttgtctttctccaagttttcaatctcatctcatttcattgtccatatcaattgctaggatgaacattttggtattgttccattagaagcaatggctgcatacaaacccgtgatagcctgcaacagtggtggccccgtggagacggtaaagaatggagtaacaggctatctttgtgaaccaactccagaagatttcagttcggcgatggctagattcatcgagaatcctgagttggcgaatagaatgggagctgaagccaggaaccatgtcgttgaatcattctctgtgaagacgtttggacagaagttgaatcagtatctcgttgatgtcgtatcaagtcctaaagaagattgagattcctctgtttagtaatcatagatcgttcgtgaaacagcatactttaggcttagttctgaaactacaggagctttattctcggatcactcatcttgaccgtgaagattggttaaatctaggtgaacagttttttgtttgaggataaatttgacgaaataaaatcgaatcagtggtcggatatgggccaagtcaatgaaatttcggtctataagatttgagctttgggcttgtacattgatacaattacatgagatggtgctatatgggccaggcctgattgttctaaaatataggttactatttactaaacggttacaatggcaaaaataagagtgtgtataaggtccggcccacttgtcgcgtgtattttaaatatgcaaataattgaagactacccccatgcgcatgaagagcgcgtttcatcaattcgggttggttatagaccacgaaaatcgcaggattttaaattatttgggaaaatgagctaactaaggcgcgtctgagagatcaaaccaaacaacatgacaattgaagactacccccacgcgcatgaacagcgcgtatagcgcgtttcatcaattcgggtaggttatagaccacgaaaatcgcaggattttaaatcatttgaggaaatgagctaaatgaagcgcgtctgagagatcaaaccaaacaacatgacaattgacaacgtggcattctatgggctgagtcttaatgggttgggcttattatttcaccaaattttacttttatacgttgtcgtttaattcttgtctctttttccttcttcaatcttcgtcttccaaattacacagttctcttccctccaatccttcatcggagctcgttgtcgccgcctcactgtatatcgttgccgtcgttgtatcaacatctcaaggtatatatagcttgtgatctttcaattgtagaatagtttttgtgattttgtatgtaatggctgtgattttccatgattctagttttcctttttcaaaatagtttctgagtttttagcggtctccgttttttttttttttcaccaggaagcttcgttagatgcggaaaacgtcatggacgcgaacaataccttcgattctgtaatctcttctcacgtcttccttttctacttcgccgttttatcgtctcaattccacgattctaacattcttcttaccttcgattttcatggaattaggatctgattcacgccatttttaagcacatttgggcccgaagatttcgcggtacacatccatgttttctcagagtaacttattcgctttatgttgatcttatctgcgagcttttttattcgattgcgatgcagaaagggagaggagcgatgccattgatgctacggaagctgaggtattctattgaaagtaaaaccgcaagaataaattggaattatcatttggtatcgtaactccttcactagatactggtgtatgactgtaacagctatgatcttctgatttcaaagattcaaaatgttcaaaaaagggaggaagattactatttctgatgctaaattatgcatttgcaatatgtgcaggttgctctgggaacaaccaagaagaacagacttgcttctggttcgtttatacactgttgcttagtttgtcatgttaattggtagatgagacatgaatatttatggtttattggttcttgtagcaaacgcaaatgctttaaaactcagctgtgaacttctcaagagttttgtctcaggtcaagttttgcattttagaaactacttagttttctctttaagtcatgttgtatctataagctatcttaaggattttatcggcattggcagaggctgtgcagcgcgctgctataatcgctgaagctgagggaatggaaaagattgaagctactcatttagagaggattcttccccagcttcttctggacttttaaggtatgattgaaaatagcacatgcttgtccctgcatctttctttttatccttatgaactaatgaaagtgaaatctcttttcttttgcttctctgtctaaaaatacataaacgcttagatcatggtatgtgttcttgtagtgatatgttatttgatcttttcttttgtagacatatgtgaagattataacagggattattccacacaagttattctgaagatcatactactggtttgtttattataggctaggctaatgtggtaatatatggttcatacttcatatagaacgaaatagatatatttgactttattctggatatatgctctgtgtgcttcagtaacacaccaaaatactctgaaatgtaagaataaatcttagccatcatcgatcttctgctcttagagattttcccttccttgatcgtagaacgttgacctaaagcagaaaagcgagatgtaggaatcttcttacggtatgaaacagcaatttctttagcctgaagatctgcagaaacagcaagcagaatataagagctagtctaaactgaggaaaagataatatttcctcagtttaaactagattctcccgccaggaaaaaacttcttcaaaccgtgagtgatgatgactcttcgaatgatgactcttctaatctttacgacaaaatcgtgacatctgtcttttgtaaaaaacgttacaatggtggttactatatatgtagtagaggttctgtcttcttatctttataatctctaggcaaactcacaaaaatgtctttttctgcggatgctctggagggtggactttcgtctcttaaattggccgccgacaagtaccgatcaatcttgaacgatgaaaaaacgggaaacatacggtggagatacggtggtcctccgattttcgacaccgtgaacaagcttttcgaagaagaaagaacccatgtaactaaaaccaactcctttctcttgcctatctttattttctttcaacactatgcttagattactaacacaaatcaccacgctgttagactagatgtacgaaaacatcataaaatttaagtagagacctatatagtaattaaatggttcactagttgctgtaataatttccaaaaagttcaaaaatctttgattaccatatgatatccgatgtgacatatagcaaacatatacttcaaaaagttgcacaagattttcttgtaaaattccttggtttacattttctatttcctagtcttagaaattatcattatgtaattggatagaaaagaagccaatttggacagccaaagaagtaattgttggttattggttgcaactttttagaaaatatgattgagacaattaacaacttcaaaatgtcaactttacgcggataagaaaacgggattcaccactaatccattttaaactaatttctaaatatcaatcaacatgtattgtgagattataaaagatacaagcaatcataactcattctccattaaaaagctaatatggctactagggaagagagagataagtatagatcagtccttgaagatgcaggacaggttcaatggaggtatgataaccctccagacttcaatagtgtgaaccagctctttgaagaaggccagactaaggtccttcggttaatatatgtttcacttaaggtatgtgctatgtttatattttgtgaatctgattcgttgatagtatttgattttgagcgcaggtgtggccagaaggttcgttagaagagacagtgcaaaacgcgatcaagtcatgggagatggagttctcacataagatccgtttacaggacttcaagactataaaccctgagaagtttaagctctttgtcaatggtagttacagctagcacttgatcactatgatcttaaactggataattaccaaacaaagatttaagtctcttatttattagggagagaaggtttatcagctgaagagacgcttaggcttgggagttacaatgctttgctcaagaactctttgcctgaagagtttcagtactataagcccgaggaagagagctttgagtcatcacatgacgcctttagatctgctttaccacgcgggtttgcgtgggaaatactctctgtgtactcggggcctcctgttatagccttcaaatttagacactggggatactttgaaggaactttcaaaggtcatgctcctactggggaaatggttcaattcctgggtctaggagttctaaaggtatgtctgaaacatgaatgggtcccttcttataatcttttaatggctaaaactctagcatcaggatttacttacttctagaggttctctatacaggttgacgaatcacttagagcagaggagattgagatttactatgatccaggagagctgttcgggggactactcaagggacctcctatatcagagaccaaaaccacagacagtggagacaacactgcagagaaacaaagctgcccattcacacactaagataataagaaaagtagaagtgtatttgaccctttaaagaatatattgtaacagtctcttggttattgatgcatggaataaattataagttatgttaggcgtcacaatgatgatagtacagataaattacaacaagaactagaataaggcggttaattttaactgaccaattcctagcagagctcaacctttgaatcaaccccgttctgacattcatccatgagagccacgttcaacatttccgtacaaaattgatcatcaggtttcaaccacaaggcctgaaaatagagaagagaaacagaataaaagactcagaggaaatgaaaaatgtatagctcaccatctgatagagaagagaagtgtttatatgttaattattaaggaaataattatagttctcttagttatagtagtgtgtataatatgataccttgtgataatatgagatggcagctgagaaattcccctggaatagaatgagattgaaatggaaaaattacgggttttgtgataatcaaagttagtattgtttcgaataaatgactggtgtttaaaagtacattcaaatacctgcaaatggtaagtgtaagccaagccggaataagtgcttaagcttttagttgatagtgtaagtgctctttcataataggagatagcttcacggtcctttctgttgacaagaattttgaccagtcaattcacaacacgagattatctacataagaggaagatcatggtagttctgtgtgcgccaatataccttagctttctatatgcatgagcaagattgaccacagttggttcccaggattcagttaatgcagatggtatatgggccaatgtcttctcaaaccaccgcacagctttaccatacctgaaatgtagttaatgttgttgactcagtttactagatagttatcttctccccattctataatgtagctttgtcattactagcatttggaaatttcggagataagcagactgtaaagagaagaggaacgcactctttcatatgatatgcaacaactccgagttcattataaacaagtggatccgaagggcatatcgcctttgcttgcatgaaaaactagacaaaatagaagggattaaagtaaatacaatgttagcaaaacactaagtcatataagttgaagacaccacacagcaatttctaatttgttacctggtccgcaagcttgtagctgtgagttcgcatatactccattccaatgtacagagttggcaaatgacacctggaacaaaataatatcaagattcaacctgtaaaaaacaatttgtaacgtaataagaagacttctacaatgcttcagggctaaggatgattcattttagtcacaagttacagatttacagtcactagttttgaagaaaacaagagtaacttgattaccctggaaatagtctagcggcagtgcgataggcagacatggcttggtcaccctcctcttgggcggcaaaggaattaccataacctatccgagctggtgagaatgagccatcaatacccgtagctttgctgcaagaccatattaaaagaaatgaagctccaggtcagacacatatgcacctacctactagatttgatcaagacagcataatgccacagcatagttacctaaagtaccgccgagcttcagcatactttttgatacaatagtagtaacaacccaccgcaaaccaagacaacgccctacaagaccatgtatgagtatttataccacagagcatcaagtaatcatgaaatttgtctcaaacacaaaactttgaaacattttcacatgatcaacgagatcaagtacaaaaaacatattcagccaaagaaacaagctctcaacgttgattcatggtcttgaaaagctgaaccataaaacaggttaactatcctagctaggattgggataaaacataagaattatatcccaattgacatgctcacccacatgccatatagcttgagaaaataaatttaatactcacttcgaagggtagtctttaaccaaattgcacgccattagatagagctcatttgaattaccaagttccatggcagcggccaaatgtaccagcgtacacttcagatgaaaaggatctttctcaaggagtctgtcaaataagaccaaaagagaccacactgctagaatcattcaagtttcatattgctcagaatttagaatcagcagtaatatacacagcattctcaagtttcttacgccgcggttagttcaaaacacttctgatattcacagcattgatggtagtactcagctttacaggccaacagatcagtgttattagccaatgtgatcatagatgagccagagacactaccactagtctcattctcaagcttcttaaacttgagttctactgtgctctctttgtcatactggacacgaagaactagtaagtaccaagaagaaaagaaaagatgcttacaaaaggaaatcgacagaacagagaatcagcaagcaaattcgaaatataagtgccacataactattgacacattggatcagacactttactcaatagataatgtttaccttcttaatcaagcatgaatagaaagaagagagccatccgtcttctggactaaattgtagtgaagaaagcagactcgattctgaattttatataattgaagtctcagtaaccttctagtcatgtaaacgactggaccatgaaacaaataagacgaaaaataaaaagcaacaagaatgcataaactataactcaccttcttcagatgtaagcatatggctctcaataaggcattccaaagcctgaaaggatagattatagaaatcacgtccatgtcagttttctgatatctacagaggtacatcaggttttcactactatacaataaattaaaagaattttatcttcccacattagctctgcaacttcccatagtaagtaaaaaataacatgcacaaattgactagggcgctagaagtacctcatagcacagaggatcagccttgatagcagctttgtacctgcaaacaaaccgaaatgatgagttaaatagctatgaagttcaagattcccacacaacactcaatcctaatagatggatcagccaacatacacacaagttcacaatatttcctactagcacttgagtaaatcttatacacatgctaagttcatgtaacaccactaaatcaataagatcactctctcacaatcatcaaaatgcagatgaacaaatgatccctgaacaagaaagataggtgaaagaaggctcactaaccattgtcgagcctgagaccggttttgtaaggctccgtatgcttttcctcttagaaagcatatcgccgatgatatctgcaaaagtaaatcaccatatatcagttcagctactatcctaaccaagtagtagtcaaccagttaatgtaattccaacagtttcgctaacaaaccttccagaatcgagaagataatactacctagatctctattatacatttaaaagtcgtgaaaaaacttacattaatctctcggtcctctccatctttatcaaaatctatcacgttcccgtctttagcatcatacacaattccatcatcatcaaccttcgcatcaccaagcatcaatagacactgatcccattccttcaattcctcctgagaacacatagaaattaattaccgataaaccctaaaaccctcaaatcaagagaaacaatctgagattcctaaaccagtcccaatcaaaacaagtgaaatagatagtggaattcggaattacgaggcactttgcggcgaggtaacggaatcgaagatctcggaggacaatcttagaagcgttaagaaggtgaaaagcgcgacggtaatggcggccgaggaaaagagcttgagcttgcatatatatgtcagatgggtcattggtaagagctgctactttgtcggcgaagaagatggccgacgagtacaaatgcttactgacgcagtctcgaaccacgcctcggatcttctcaatttcttcttccctcataatttcctcgcctatcgaattattccagacgaaatctaagcaaagatcgtaacaaaaaaagttggggaagattatcgggaaatttttgttcttccgatttctctagtcaaaagtgtttgagcgagagaggcgggacaagggaagagcctcggcgggagtgtaattattttatcccaccttctatacatatgggcttaggcccattatgtatagccttttacgcagtaacaattgccgcagcctaaattaagttgtgggctttcagcccattgacatagtacaaaaaagttaagggacgcgcctataattaaaatatgggacccacagaggcacgagttaattgttctattatgcgcttctttgactaatgacacaagtcggttattctattgtgcgccactctggttattagccactagtggagtggaacagttagaaaaaacaagcgttacgaaaacccttgggccggtgaattccacgaggattcgtctctctatatatcatacttcttcaggagccttcatatttgatttcttcatgctgcttcgcgacatcgcaggtacagatttatttccttaggttccttgtgtaattcaatagatattttgtatgattctagcgaaatttttctatcaaatgttgagtatttctatctgatttgacatctgtgatgcagattaacatggatacaggaggagatgagaaacgtgcaagaagaagcgaagaggataggctgagcaacttaccagaatccttaatatgtcagataatgttgaatatccccacgaaggatgtggttaagagtagtgtcttatccaaaagatggagaaatctctggagatatgtacctggtttgaacgtggagtacaatcaatttctagactataatgctttcgtgagttttgttgataggtttctggctttagacagagagtcttgcttccaaagttttaggttaaggtacgattgtgatgaagaagagcgcactatttctaatgtcaagcggtggatcaacattgtcgtcgaccaaaaacttaaagttctcgacgttttggactacacttgggggaatgaggaagtccagatacctccatccgtttacacatgcgagagcttggtgtctttaaagctctgtaatgtgatcttgcctaatcctaaggttatatctttgcctttggtcaaagttattgagcttgatatagttaagttttccaatgctttggttttggaaaagatcatctcaagctgttcagctcttgaaagcttgattataagcaggagttccgttgatgatataaatgttttacgtgttagttctcggtctctactgagcttcaaacatattggcaactgttctgacggttgggatgaattagaagttgcaattgatgctcctaagcttgagtatctgaacatcagtgatcattcaactgcaaaattcaaaatgaagaattcgggttctcttgtggaggcgaagatcaatattatatttaatatggaagagctaccgcatccaaatgatcggccaaagagaaaaatgattcaagattttctcgccgagatctctagtgtcaaaaaattgttcatctcttcgcatactcttgaggtaacctttgtatttgcgcttaagtttttttggtttgctgaattcgttgttttggtgcttaagaaacataatcacccaacttttctttgcaggttatacatgatttggggtgtgaactacccttatttcgtaacctatcctccttgcacatagacttcgaagaccacaccttgaaaatgttgtccacctttctccagagctgcccaaatgttaaatctcttgtcgtggttaggattattttactttaattaaacaagaaactttaatctcttttatataatgctaatggtgaactatcatatgcttaacttgtgtttttcctatttggtttatacctgcaggaatttaaggattcctcaaaagaggacggagatagagttttatccatacctcggtgtttcttcacaactctcgagtatgttaagatagagaggccaatcacaggagaggcaaggggaatgaaagtagttagttacattttggagaattcaccaatcctcaagaaactgaatctgtgcttgaatagttccagagagaaatcagaatctgtcattctcaaagaactccttacaattccaagactctctacctcatgcaaagttgttgtttttgaacctcgtagttgttgggtacttggttgatgttaagtatatgttttcttcatcgtttgtgatgattttcatgtttcgtatcttggaagacaatcatgtgtttgttggttgtaatgactatgttctgtccattttattatttataagttatgttctgaaagaaagtgggaaggaacttgtaaatttgaagattttatatgagaccttgattgtcaaggcacaaaaacgaccaaacggtttggtctaaccccattagcccattattacaagcccaatcacttgacttacaagttaaaattacaaatgctgtcgtattaactaatcatgataccaaagactaatcggatcagtaaaccgaattgatccgaaccggataaggaacagagtgaaactctgaagtctgaacggccgccgaagaatgtggaactggtagacaaaatataggaactgtcgatcgatacttcctctattacaagcttttacggatttcttttccatttgatagttcatggatggagccggtgagaaacgtgttcgtgccaaaggctcgcgtgaagttgactggataagcaacttgccagaaacattgctatgtcaggtactcttctatcttcccacgaaagatgtagttaagagtagcgtgttatctagtagatggagaaatctctggaagtatgtacctggattcaacttgagttattgtgatttccatgtccgcaacacattctcgtatgaccacaacacattcttgcgttttgtcgacagctttatgggtttcaacagtcaatcttgcttacaaagttttaggttagagtacgattctagtgggtatggtgagcctaaactggctctgatcaggcggtggatcaacagtgttgttagtcggaaagtgaaatatctcggtgttttggatgattcatgtgataattatgagttcgagatgcctccaaccctttacacttgtgagaccttagtatacttaacgctcgatggactatccttggctagtcccaagtttgtttctttaccttctcttaaagaactccatctaagtatagttaagtttgccgaccatatggcgttggaaacactcatctcacagtgcccagttctagaaaacctaaatatcaacaggagtttctgtgatgattttgaatttacatgtgtgcgttctcagtcactattgagcttcactcatgttgcggacactgatgaaatgttgaatgaagatctagtagtcgcaattgatgcccccaagcttaagtatctgaggctcagtgatcatcgtattgcaagttttatactaaatgatctggcttcccttgttgaagctgatatcgatactgtctttaacttgatttgcaagaagatgttcaatccaaatgatctgaataaaagaaatatgattcgtgattttctcgtcgggatctctagcataaaaactttgatcatcgcttcaagtactcttgaggtaacctatattgaatttgctatttgaatgcttaactttatattataagtttacactgatacttttttttttgtgtggtcctaggtcatttatgattactcaagatgtgagccactacccttattccgtaacctatcttccttgcgtgttgacttctacggctacaagtgggaaatgttgccaatctttcttgaaagctgccctaatctaaaatctcttgtcgtggtgaggattgtctactactgaaccatgaactttctatcttaagatggaaatggtgataatagcataatatattgaacttatgtctctttcacttggttaaatggtacttgcagggatctgctaattatcgggagaaggagggaattaatatcttgtctgtacctcggggtttcctatcgtctctcgagtatgttaagatagaaaggccattgaaaggagaggcgatggagatgaaactagtgagttacttacttgagaattcaacaatcctcaagaaactgaccctatgcttggatgattccataaagaaagaagaatctgtcatcctaaaagaactcaatactattccaagactctctagcgcatgccaagttgtcattctctgatccttatgctctagatatcgactatgaaacatatttttaaagtttccttcaagtacgtagttagtctgatttccttgctcttttttggtagtttgcgagtgatttcataaaacggttgagttctttttgaagactctttcaaagtcacaaaccaataacacccccagaccaggcattagtatatttgtttttcatgattgacttttagtaatgcaaaaggctcatttagtagctttaaattacttgttttctatagtcttgcaaatttggggcttaagttgattaacaagacacctaagaagtaataacctagcccattaaaagcccaattacctgatcaacaattgcaattcatactaaaaacgttaacgtttacaactagggttcctaaggacggatatcctaatcggactaaaccgaatggattcgaaccgggttcacacaagtacatatttgtttctctctatcgccatttttgataagccctcgttttgaaaatttgttctattttgaccaactctttcgcgataataatcttaattaacgttggagggaagaatttgaatcgtttctctcaatgcgaggtttttcgattcacatgggtgaagctggaaggaaacgtgttcctgccaaagccaaacgatcgaggaaaagaaaaagagaggttgaggttggggttgattggataagcgatttgccagaagcattgctatgtatagagctgtcaaatggtccgtccaaagaccattgggcgtgtacgtacggacagttttttttatgggccaagttggacggtccataatggacaatggtccgaaaatgtccatgcccaataaagaccatgtccatatgggcaagtccatggtcagcccattttattattgttattattgataaatcaaaaatcatgattttaaagaaaaatttaaaaattttatttttccaaaaaaattgtaaaaatcggagacttgcatttttccgacaaaacagtaaaattgtgtttttcttaccaatacaataaaatcacgattttggcggaaaaattatggaattgcgttttcccgccaaaaccgtaaaattagagaattgcgtttttccgtgaaaaccgtaaaattagagaattgcgtttttccgtcaaaattataaaatcggagaattgtatttttcccgtcaaaaccgtaaaatcgaaaatttgcgtattccaaaaaattgtggaatactattttctttcaaaaccgtaaataatttaataagaaataatttattaaaatttaaaattttcataaaaatagaaacttataatgtaaaatatataatttgaaaattatttagttgtaattgtaattaaaattataaaaatatgattaaaatgaagacatatctattgactcaattcatgtccatgagcaacccattgtccatacggtcaagcccatattgtctatggacaaaactgataatatgcccaattagaccatttttttttgtctggaatatagttcgcccatatgcatttggactgggcaagcccatgggcgtcctgcccaattgacagctctagctatgtaaggtacttctgaatcttcccactaaggatgtggttaggactagtgttttttctaagagatggaaaaatctctggaaacggtacctggattagacttaagtggcgaggatatcgaaatgtactaccaatacgtgagatttgtggatagatttctgagatttaataggaactatcagatagaatattttaagttaagctaccctggtgatgggagttctgagcgtgaagttgatctgctcaagcggtggatcgatactgtcattcagctgaaggttaaagatttagatttttttgactattcatgggaatgggggtttgataactttcagctaccttcaaccatttacatttgtgagagcttggtatccttaaagctatctactgttaccctgcctagtgtcaagtctgtttctttaccttttctcagagttctcaagctaggtgcagttaagttcgccgaccatttggatttagaaacactcatctcaggctgcactgctctcgaaaccttagctataagattctttgatcgcgtccaagttttacaagtgtcttctcagtctctactgagcttcactcatgttgcgcccaagcttgtctttactcatgctgtgcgaaagcctttggctgaaaaagatctatcaattgtaattgatgctcccaggcttgagtatctgaaactcagtgatcatcagacttcaagtttcataataaaaaatcctggttcccttgttgcggtggatattgatattaacttgtcttccggcttcgattcgaggaatatgattcgtgattttcttgttgggatctctagcgtcaaaaatatgaccatctcttccattattcttaaggtaacctatgttgaattggatatttgaatgcttaactttatcttataagttttttcctcatatttctttttattcttgcagatcatctatgattacttaagatgtgaaccactacctccccattccgtaatctatatttcttgcatgttgagttctacgactacaggtttaaaatgttgccaacctttcttgagatctgcccaaatctaaaatcgcttatattggtaaggatttttcattgacccttgttataatgcaaatcgtgaaaatatcataaacgcaacttgttttggttcacttgattgtacttgcagaaatctactgaagaactggggatcaaagaaagtagtatgttttccggacctcaagatttcttaccatctctcgagtatgttgagatgaaaatgccattgaagaaagggttgctgctggagatcaggatgctagtgggttactttcttgagaaagcaacaatccttaagaaactaaccctatgcttggatgattacagaaagagaaaagaatctctcattcccagaatccttgccattccaagaatttctacctcttgcgaagttgtggttctctgatccttgtagtcgttgatgccgccgattaactaacacaaaagtttgatttttttgataactttatttatttgaactctgtttctttcttctttcattatcgttttcatgattatcgtagcttaattctttttagagaagtttatcaatgtaaacacgcgattctcttaggtggtactttgccaaatatatatgttattgctttcctcctcatttgtcgtgttgctttatttttataaatattgtacagtacagaggcttggaaaaataatagcaggttcagaggctaaagaaattgtaaatttggggatcataatgaaaaaatattatagttgacgaaacttgcacgaccaaaacccaacaggcccattgtgagcccaattatgtgaggcctataaaatattacatctataaggacgcctgctaatcaaccactacagtgacactgtcacggccacggccagacgagtagagactagagagacaattagacgaagcagatactttggccggaaaattagacggcgatttttctcacactgttctcattcttcaggtactcgctctctctttctttctatctatttgattcatcgttccaagttgattcttcatccgaaaatagttttacaggaatttttttccgatttgatgtttgtttactaggtagagtagatggatgaagacgcagagagtcgtgtgagttccacacgctcgtatgataggagaggtcatctagattggctgagaaaattaccagattcattgctatgtcaggttttcttgaatcttcccacaaaagatgtggttaagactagtgtgttatcaagtacatggggaaatatatggagaagtgtacctggtttggacttggggtatggtgacttcccggagtacaacgcttttgtgagctttgtcgatagctttctgggttttaacagcgaatctcgcctgcaaaatttcaagttaaactaccaatatttaaggctaaagtatgaatggaagtggactgagcttgataatgctaatgtcacccggtggatcaacacagttattaagcggaaagttgaacatcttcatgttacctcaaacagtaatgtgaattggaatgtgaattgcagatacctcaaacagtttaaacatgtgagagcttgttatcattgaagctctctgacgtgaccttcagtaatcccgagtctgtttctttaccttgtgtcaaagttatgtatctagatatggttaagtttgccaacgatttggctttcgaaatgctcatctctggctgcccagttctcgaaagcttaactataaagaggagtgcttgtgacaatgtagattatttacgtgtgtgctctcagtctctattgagtttcacccttgttggccactgtaacgaggatatggttaaagagcaagtagttgcaatagatgctcccaggcttgaggatctcaagctttattgtcatgaaactgcaagtttcataataaagaatccggcttcccttgttaagatggacatcgacattatgtttaacttgtcttccgaacagaagtttgacccaaatgatctaccaaagagaaatatgatccgtaattttctcctcgggatctctggtgtcaaagaaatggaaatctcttcgcataccctcgaggtaacatctgctggattctcttatgttcatgcttaagtttttcatgtgagaacttgtattacctctcaaatgcgtttattacctatgctctgtttctgtttttcttgcaggtcatctataattactcaagatgtgaacgattacccgtattccgtaacttatcttccttgcatgctgacttcgacgactacaggtgggaaatgttgccagtctttctggagagcggccgaaactgaaatctctctctgtggtgaggatttattactgaaaccataaacttactctcttcttaatgcaaatactgaaagtatcacatactcaacttgtttcgtacacttggtcttacttgcagggatttagtaaaactccaggggaggagccaattagtattttacctggacctcagtgcaacctaccagctctcgagtttgttgacatactaaagccaatggtagagaaggaaacagaattgaaactaatgagttactttctggagaagtcaacaatcctcaagaaactaacactacgcttgggtgatttcagaggaaatgaagaatctgccttgctcaagaaactccttaccattccaagactctctagctcatgccaagttgtagttctctgatcctcatagtcatagactctttaagtacttagttaatctgaattctttgctcttttttcgtcttcttcgtttgggatgatttttgatgtcatgtgaaccttaagaaggtcatatgttttggttaaaatttagtaatcttttctttcgactcaggtaagatgcttcaattgaaccaaaaatgaaaactctttaccaatacagctaagatggttaggtaaaaactaaactataaacttctggccagttaagagtctatctctatttgtttacgagcttttaaactattcatgtatgaatggtgagtgactacttctaggctctaatgagctttacaaaccgaagaaacctagctcgcttgctttttctttttcgaaggtttcgaaatactgatatatgattgtaaccgcaagaaggattccagtgcctgacccaatagctcccattaaatcagccaagacagtgagtgcaccgatacacagaccaccaaaagctgcagccgtgggaatgtatcggttcagttccttttgaaggtttgagtctcggtgaccaggcattaccatttgctgttcctgaaaaaaatcaacacaaatttaagagttatagtcatgcaaaagacccaaagataagaattggatccgcaactttgcttagaacaagggtgatcaacaaacaaacatactcttagttgtctggcgacatctttggctgatgaaccggagacttcaatccaggttttagagaacaacgcacacgcggctaacatgaacacaagatagaacagagcgtgaaaaggatgagttgccatctcagctaagctgcaaaacagaaacacacgaaagatgaaaagttaaccaaaaggtagacaacatatcaagaaacgaagcaaagaactaatttaccttgacggagcggttatgtagtacgcaataccaccaacggggatagattgcccgctgtattctgactccttccacgtaccgattaagttcaccaaaaagttcccaccaaactttctgtataatatctatagaaacagattcacaacgtttttaagtataaagagcttcaatattaagtacagatttaaagactatgtgtagattgatacctgagagatgaagtagatattggaaacaagagctgactgcaagatgataggcatgttggaggtgtagaacaatttgataggataagagcctcgttgtccacgagcattctttgatctcactggtaaaactacccgaaagccttgaaagtaaatcactatcagaaagatcaagactgtggcatgcagattcgtcacattgggaaggttctgcctgaaaaacgcttcacgaagtgcgcggactttatccgttcgagtaatgagaaggtggaaaagagcaataacagctccttcaaattgagctccacgcccactgttgatggttgtaggactgaatgctttccatataatgctttcactaagaaaagaaactccattaacatctgaaatgcgcataacggtttaaccgagaaagctagacgttggagtacttaaaactcaccagatattagtagcaatgaaaagggaaataccagaaccgaggccataacctttctgaagaagctcatctaaacaaagaacgataatggcagcaaaacagagctgaactatgataagaatagcattaccaactcctagttccccaacactaccatacatcccagagagaacatatgcaactgcttggccaaccgcgatgaggattcccaacagcttctgtgcaccattcctataaccaaaaacttaaccctattagtctctatgaatcgatctttaaagactttgagcatatgaaacataagggtgtaattaaacccttacaagagtgcacggtcttcacggacattgttatcgatttcaatgatcttggaaccagcaagaagctgcataaccattccggaggtgacgattggtgtaataccaagctccataacagtacctcggcttgaagcaagaatgacgcgcatccaatagaatggatccgcgcctgtagtggaatggattccataaagtggcaattgactacaaaccaagaagatgaagagagagatcacagtgtatatgactttctctctaaacggaatcttcctttctggagattggacttctggtaagaatgcaaggaacggtctcacaagatgaatcactctaaaccctcctaccatcttcttgtgaagtgttttatctgtaaaaaatctgaaacaaaacgcaattaactaatgacaatatcaaaaaaagaatcgctaacaagttcttggttctcagaactacgtaaaaaaaaagaagatcacaagacccatatgcgaagctaagtatcaacgtctagtacacaggatgacacatacgcacgcgtaatagaaaatcagataaacgtagagaacatgcggttctaatggaaaggaaaaatgtagaaggagaaccttaggaaaagaaatatattatgcgttggtatcctgtgagaatgttaagcaaaaaatagggcaatgagttgtgatacttatcatctttgacaaaaaaaacaaaagtgatacttaagaattttttaatattatttataatatttgtttaatatatatatatatatatatatatatattttttttttcttgcttttgacaaatgtgtgaccaattcgaatgccacatagatgatacttgtattaaaaatatcactactgatcaagttcattctaattgttttgttaatataaaaatatttttttaacttgtaatactttagaaatatcacccatgtatatggtctaaaagatcattcaaaatctgaactaatttgacatataataacctatttctacttggaatttacataagaacttttttcttgtaaatcctttttctattacaaaattgttctgattttaaaacttttgattttgatttatttacttattatgtaattctttagtagataaaggaaaaataatgtttaaggaatattgttatttggtcatgttattctgaatttgttatatggtctaataagaatttgtttacgtaacttatattacaagtaaagttttaacgaaagataattattcgtttttatgttatctttcttaggattttaagaaagcaataataaaatttaattggaaaagtttatctattggaaaagttgcttaattatctcaaaaaaaaaaaaaattatctattggaaaagttgcttaattatcttgaaataataaatccaaactttctttgctaccaaaaatttatctagtggctgagaagagctgtataaaggagctggttccaagcgtctgggactccagggaggcaccaatggctgcagtcgtttaagcgatcgcctccaccggcatagatggaagggtgaccgtccttcctcatctccgtcatagccgtcacatcaaggagctccactggtttagccatccttccgatcacacttttcactatagcttcaccttcattaggtcgtccggggtaacttggtccttgcactggtaccgtctcacccaagcaagtcttccccggtttaccccattcaccaccacttcaaattaaccaaaaacaaaaaaatacggttacgtcttgttaattgattaattagtttattatgattactagagaaagagagagttaactttaagtgaacgggagagacgccttgatagaaaaccctagtttttgaaggatcgatattgtgatcaatccatttagaccaagttgtcaaagcaatcttgaaagcctccattctattcatctctttcactattttatctcccgtttgaaaataatcccatctacattatcatcatcatcatcattagagtatattatgtaatatgtatgttgtatacttgtattattaattaagctcatatataagatcgttggttgatacttacgttttggcacggccagtgtgagaccaccagtggaatgtgttaaagatggcgacatcagatcccaaccattgatttcccctactgatcgaatctaatttcagaatcaatcctcttgttttgtccgataccaaatccaccaggaacccatttttcaggaaatttacagatattccatattcctataatatcaatgggggaaacaaatcaatgatatgaaattgttcgtcttgattagaaataaaccggttgagctacgtactggaatggtgaaagttgagaggcccttgttgagttggaaggtatacttagcgttaggaacggccgcgtgaagcatgcaacttagtgacacccacatattgttgcttagtgaatctcccacaaacagtatttttttccctttgaatcttgttaagaaatctcgtccgttgaatctgcaacgtcatacatctcagccgttaattacttaattcttatcaaaatataattaatttgctgtgtaactttgcattttgagatctgaacatgacaaactttggtacacacttatctgaaattttcagaactttaaaatattcaatttgttttcaatttttgttaatcaatttcttatgtcaatttgactcaattcctatttttcatagaatattaatatgcaatgattaaaattgtcaaatattgctaaatagtcataattataaaataacaaatatttattacatttaaaagtgtaagatttatatcacatttcattagtattaatttgagatctctgaccaattatatatgaaatgaatgcgaaatctccaagattacttccccactattcaaattatatgcttcgttacaatgaacaagaaaacgtaatccatttcatcgtgatcaaggggttaaaaacaaaatttatagaagtgaaagtgaatatcaccttgggatgtcacatccggtgggttgccatcggtaatgaaggtagttcttgtccggccgaccaaacttctggcaatccaatccaatgaacggacaagttgatgttccataaagaggattagaagaattgtcataaatccaacgtccttggtaaatgttacactttgttgcgttcttgtaaccatcattggtcttatctgctaagacaccataatctgataaatcaacaagaaaaataagaagaaggagaaagaggacctgatggaaattcattttttgtaattagaagagacgatgtaatgtgatatatattaaggactaagttttgcatttatagaattaatacacgtattcgcatgagtgtaaaatttacgtaaattgctaaatatctataatttgggaaattaataaagaccttttgttgagaatagtcaatagtcaagaaaaagatctctttctcttttggttaattggactagaaaaaaatttctttctcttttcgtaaaacttattaatttagacgcaggatatatacattcttacgtttaatttcactcgattcagagtcttccaattggtggtgacctcttgcgtaacaatatgacaacataatatttactgaattaaaatatttttactgaatgttttttttttttttttttttgtgaacagttttactgaatgtttacattttgaattttgttctcaaatggaaatggtttactgaataaaagtttttttttactggtgatcaataaactggtagggataaactcaataatttatttataaattacacgtggcagaatgctaatggatagcatgtgaccatctctcagttatacgtacgtgcattgaccacgacctaagctttgtgttgtcttccatgtgatgattatagcgaatatggatacactttcgtcatccaccttcctttgtgaattacaaaaaaaaagtcgtaaggaccaaagacgaacaaaatcgagcccatgtcagaatatggaatctctagccgttataaacagagactcctctgtcactgcaaaaaccttccttatttcgtcgtgttgaagcgttttttgttgactaataaccatgataatgctataaaacaataacataatttccttcgttgactataagtgttaacataaaccgtctaattataaccactcaaaccggggttttacgttagctgttaaaccgggaaggttacgaaacgagacagtgaaacataggcagtgatagaattcaatcacaagctaagggtacaatattaggaagaaaagattacggtcggggacagataaacgaatattataagctgtgttttaactttgagcattacatgggaagagaacaatttaaataaaatttggagcaacatatcaagaacggttttggttcaaccgggtttgaaaatgtacatgtggctttggaattacctggtgcttgagtttccaagagtgagttcaagatcatctgaaccactctcctcgtgtatcctctctccttcccatgctttcactagcccgtttgtattactcccaaaagcaaactctggaggagccacggcttcagacattggaacatctgctgtctggtcagcaccaggaggaatagcaggggagcaggttccgctttgacctggtgtccacatccttgaccctcctccgcctccagcagcagaggctgcttcttctttgaatccaaatgggttttgtgagacgaggctaaacgttggtgaagctggaacactttgtgctagttgaatccctgagaaccattcagagtcagggatgatctgacgcgtgggacttggcggtgttgaggagacaaagaaggagttgttgagttgctgccaatcagtgttcattctcggggtacgagctgttggagagcttaaaggaggagttacaggagcgcttatggagcctccagggatatagaggtaattagggagtcttgatgatgaagaagctgatgaggatgatgttgttgagaggtgttttagccatgggatgagagattggccatcaccagaggtaagattagcaaatgaggatgaagcaggactcatgaagttggaggagcctggactaggattataagaagcacagggacttggctgataggaagagcaaggactagcggttgctgaaccaccacctatctccatacgctctacaggtctactacatccctgaaaacatatcaaacaaacatgatcaatgtgacgtaatccttctaattacatgaattaccaagaaattactctgttaataatgacaaggaagttacaagtagaactagttttgattctatcattgtgaaaacaagtgaaagagacagtgatcaggtcaaggattcttgaaccgacagattatctatcattggactcgattctcgaagtttgagtaaaaagacttgagacataaaagcaaaagtgccaacttgctttcccaaaaaatctacagatcaaaacgtacactttgaattctgtgcaagaggacattatttttatcagtttttattgagatctatgctactttctttttttgtggtgagtatcatctgagaatagactcgacctggacaacaagtgaattagtcacacacacacaccatgaaacagagagagaaagaatctttttttagagaaacgcataataaaaagtcacacataaagaatctaacatttgactaacgctcctctaagctaaggctagctaacctacgcggagaggtatatcaggaacacgttagcattcacgcgaccgatcggctccggcgcatgttagatgcaatcagtaatttaacaaaaactgaatgattttgtatccaaaattcaaaactttcatgtacttgaagcgtagagaacaaaactaagatccggattcgagagacaaaccttgcggtaagtagttccatcaggttcgacgatccaaccagcttcgttacagagtgctttaagcacttcgttgttgtcgcaatgcttcggaagctcgtaattaccgtacattcttaatccggtgaagatcttagctgcgattgctctccgtcgtctttctcttctcttgttgttctctctttccctccatgtcggcattctcgtccctgatgtcatcactactctctgtttcttcttcctctgaaaactctctgtttcttcttcctctgaaaactctctgtttctttagctagatcaaagataaaattcgaagctaaactcaagctaattcaacctaagaaagagttcctgaatcttcggtgaagtaatatatcagatctggcatcaaaaacaaacgaatcgatactgcgtgaaccaacacttttcaatctccgatcagatatgcaacttgaattttccgtcggagcgaaatgatctcaccgagaaaactcccgacggcgagaatcttgaaaaaagcaaaaatcgtggaaacagttgcagtaacttgttggctgcttcaccttcttcaattgagaaaaagagaagaaattttaagatgaacttggtggatcaagatgcttgggaaattcgatagaggtgaattttccggttatcggaggaagaagaaaaaacccgggaattggagaagaagatgaaggagcttaagctaatcatgaactctctcgtgccagagaagaggagttattactttcatagtgaaagaagccaaaataaaacaaattattgaaactacctttatacccgagatttgaccctatatttacgaaattgccactacatgaggtcacgcatgtcctccggacctagcacgtgggagcatacaccattaccccgcgattcagccataatttaccaatttgccatacatcgagcaccattaccacgtgcaagagctagcgtttacccctaaaacgtgatctgatttaccaaaatgccacgaaaccgttttggctgaccttgggaagtttccttttcacgtgatagtgcgtccccggcgtgaccctgtagggcccattaactgatttttttgcattcgcgtaagcaccactcgccgcaccggtggctcaataggctcacgtggccgccgcgtctgtttgccacccacgttgtctctcttatcagaaagaaccttctctctctgttcaaactggtcgtttaatgctgtttctgtccaacatcatcagcagaaagacagaactggccagatcatcagcgttacagacatcacacaaataacggtcttgtattatattttgttgatgcttatattcgattattgtcgctttttaagttttcactgaaaaaaaaaaaaaagttttcactgaaatcttttttttgttaaggtttttcactgaaatcttgctataatcataagatattgataagatataacatttcaacaacatacattattgcgggttgctatatatcctagtcgataaaataatttaaaatgcgagttattaaattttcatagttatataattttttctcagcttcaggaaattgaataaagataatatttgattaccatggcgaatctaaaccggaactttaaaagttgtgaaccggattttgatatgaagtttcccggcggaagtcacaaccgcttggctaagagtctcaatgtttccaaggaggattgaatcttctcggacagagctatgtagaggtgtctctgagcagtttcgtctagcacttggccagcagaagtgaggacaggccatttcacttcttgaagaggaggggttacatggcgggagtccaagacagcagtctcaaccatcattggaacatcaaactcaattggttcaccaaccacaactttaaggtgtttgttcggcaacggtaccagtggtcttcgtccattattgtagttctccggcatcatctaagccgttacaacaatgtgggtaagtgaccttcgaatgaagacataataatactatcaagcagaaattcgaagtttggaaaatggatacataattcatggctttttctctttcccgcagacatttagctatcgaagtttaaacgattattgagttaagcagacttagaagggaactggacgagttacctcctcaaaaccacggtgaattattggcaaaacgattggggtaactggggaacgggcgatgaggcttgcagttccccatttaagtcgtcttataggaacatcatcttgaaacacctttccctctgggaaggtatgcagctactagtcatggttaaatccaaaggtcagaggtctgaaaagatctaagtacaattagtttaaaggtgcaagataacatacccaagatccatcttttaatcgctggagagcttcattcatgttttcttggtagattccaccacctctagttataggtatacattttcctgctcaaaagaaatcactaacatgcatcatgagaaaatcctattttgttaagaaggcaatccaccaaatctactaaaaaaagttgtgatacaagtccaaatccatacaaaacaagaacaaatcactgattacagtctttcccaagagaagaagcaacaaagaaaaaaagtgacataccagtgcggaaaatgtaggagaatatagggttcctgaaacatatatcctctgcagcaagaacccaccgagccaattctggatctaaggaaaggagacccttaaatgccccccacattactggatcatccaaactgattacacaacaaagaagataaatcaacatcaaaaacacaaatgagtggaaagagatgacatgaagaaaggatcatactattaaggttttaatattaactaacgtcgacatgtgattactaacagtgatgagaggaacaccaggtggtcttgactggacaagattcataagagtatctgcattgtgaactgagcttttattgcaaagatttgctactgcttttgcaaatgcactaacagccattatcacagtattccttggaattcctcccaaatgatcagatcttgctgcccattccattatcttccccattagcttcaaagttctctcccttcaacaaattataacagaacctcaagctacttgcatacagggccggttctgatgtgcgaaccggaaattatcatatctatgacaaaattcgatgcaacggtttcatagctagacttcgtttcctaaccccgactaatctaggaaagttttaacgatagaacggaacaattagggtttatcaatctcttttacttgattccacctaagaagatctacattgacactgaaacaaaacttagagaaggaagaagacttacaattagaaacgagaccagacgattggtgttagagggaagtcgaagaagcttgcttgggaggaattcatcgagagagaaacaacacagtgcaaatcgatgaagaacagtcgaatttggctggtatatttcggtttaaggaataataaaccgggaagttttgctagtcagactctgtctgtcggttggcaatgaagaccattcaatttgttatcaggccatagggattttgtggagcccaacatatagatatattatgggcccatatattaaatatttaactaagcccaacaaatatattcttgtaatgatcattttatgtaacaactataacatgtaaagaaactgtaaattctagaagaacaggttaccaattgaatgaaaaacagaactcgaatcttataaaatgtcatgaaacagacagatcacatattttatattaaatgacaaagttttatgtaacaaaacatagattcattatcttattaatagtgagtaaacatatataagctttttgttttgttttatgaattagactaaagatagaaaagcgtacattatctagtttaatgtcaaacacaagccataggctgacgttcaaagttacaacaagttcacagataataacagagtcgaaggtacatatttcactatacacacgagaggatacacaggagaggttatagttattagagaagggatcgttgttgtgtgaagatgtaaacctcgtcgtaaccaatcctgcaaaatccaccattttattcgatcctaagaatcgttaaaacttagaagaaaaaagaagaagacgaagaagagagaattatgtaaagattgtcagagtggctttaccctgcgtatccacagtaagtaggcttatagttgtaaatgagattgctcagcactttcttagactctggtctgttcagtgacttcctagcttcactgcatcacattcaaacacgatccatgagtacttcatgatctaaccaactctcagttatactgattctaatgtagcaatcagagttggtgcactctcttatcaattatttcaaaaaaatggatagagaactaacctgactagatgatttgcggcgtgctgagtcacctggatcgcgtcctcagagtgtggaattttagatgatccccactcgaatgcatttttctgcagagtatagtacagagattttctttaatagatgataggataccgcagtggaccacaatgacaatgcctaggcgtgaaagactaaatgagagacgtaaagttaacttgtgactgtatatatacctcaggatgccactggaagccggtcactggatattttgttgattgaactgttgaaacataaacctggatatatgttttaatagatttggtctataaggtcacaggctattgaatctttttaggtattcttggggacataaaaataccttgccgttgtcatcaacgcatgttgtgacaattttaaagaaattagacagagcaatatttccttcaaagctttgtggtgagataccaaactggaaataaggacaattcatatcagaaagcagagagaaccgatgataataaccattcaagaacaagaaatcaaagaagtggcaagaaaagttgcttaactgcagaggtcaacaaaactatgagtattgaattgaatgtataagtatgtttagcaacaaaaatggtgaaaactatattccatagtattaactgtaaagacaaagtactggttactaatactactaacccgatgattctgcataaccagacaatctgtaccgagttttttcaacagctctggaggaaatctgcactatgagacattacaaattacatatgaaatatttgactaatatttttggtatctgtatatacacatcctcatgaaaagctggattacctttggaatatggttccttggatattaacattttcaacgaactgaagacttgatgcagaatttcttgcatccattttttcaaaaatgtctctgttctgtttacaaggccacatattagaaattttcaaatggtgttaaactacacaacatctggtatggcttaactttacagcttagcaaacacatatgataagcaagaagaaagggtcacctggcttatgatcattgtcaagagctcaaatccgaggcaaatagcgtatataggaaaatgctctccagcatcatttctttccaaaactttctgagaggatatcatagagatatcaacaaaaaaaagcattgtataggaattatataaatcaaccaggaaaaaaagttgagcttacattgaagattttcttgacgatttcaaaatacaatccttctttagcccaaccaccagttagtatcacaccgttgaccaattctagcttctgcagttccaaatgtaaatcaattttggaagcaatcaaattcttaagctagaacagattacagaatcggctgagcaaaatgagagtaacctgaaagagaatttcttcaggctcgttaaagatgagtgggatcacacgtgctccaccagactcagctaatttcacatacgaagccgcaatggaggacgcgtctgtagcattgctcaaacgacctgacgcaccgtcgccaggatggctcagaataccaataaccggtctgtaatttaggttcggatccggagcagagcataccggactccgagaaatatcaaatccggtttgactagggaggagaatcgtcgcagccttggccattatgatgctatccttaaagagagatagagctaccaacggtaaccaaacgtagctccacatctcagaggaagaggaaagatctgagtaaagaaagatcaatggaggagaaatgaactttcacgattttgggtttttgatttcttcacacttcgaccttcttatacaaaatcgagaacctaatcttcaccgtacacgtggtaatagatttttatgcacatttatttttaataggtgtttttgtaaaacgactttcgtgtatccctctcagtggtggagccgtggagggcccaatttgatgggtgcgtctcattattggtcacccagtacgattgtattgttgataataataaattaataacacatgattaaatgagtttttcgaaacagacaaggtcctttcgctgtgtctggccaaaatcatgattgcttttttgccttaaaacttgatctttgaaaagggattttttaggatttaggttttagaggaagatatgggaacaagtgattgcgtcctcacgcctcatgtgatctatactgtgtttttttaaattatagttcaacaccttggttacaacttacaatcaatggtggataaggagaaacactgtattgctcttagtaactaatataaattgctatgttttggcgaaaacacacagagaagggatctttgttacgtgaaaatataaacctcgtcgtcaccgctcctgcaaaaaaaaacccaacgaggttgatcatacatgatccaatatttgttaacatacagcaagaactgtaaggattggactccaattatgaagtggctttttttttgttgtaccctttgtatccggagtacgtaggcttgtagttgtagatgagattgctcagcactttctcagaagatggtctgttcattgactttctggcttcactgcaccaacattcaaataagaaaattgaaccactacataattcttttaatgatactttccaacattgatcaatagagaactaacctgactagataatttgcagcatgttgagtcacctgaattgcgtcctcagagtgtgggatttcagatgatccccattcgaatgcatttttctgcagagtatattttaaggatctttttagaaacatatatccattataaagcatatagcatagtaaaagatataagttaacaaaggattgagaagactaatgagagacacaagttaacttgtgtgtaatacctctggatgccattggaaggcggtcacagggtatcgttttgatcgaatagttgaaacaaaagtctggaaagaaaaaagataaatttatcccttcattgaaattgtcagcttgtggaatttgtataatcggtgtataggaacatattaactataccttgctgtctttatcggcgctggttgtgacgatattgaagaaactagacagataaggattgccttgaaagttgtctggtgagataccaaactgggaaacaatagcatttcatttcagaaaagcagagagaatataataaatcattcatgaacaagaaaacaggaaatataaaattgtgtaactgtataggattaaagatacttataagaagaaaacagcaatcaaagtatacttaagagcaacaaaaggtgagagctatagcctatattcatattctgcagaaaattagagagatactaacatagtggttctgcataaccaaacagtctgcactgagctttttcaacagctctggaggaaatctgcaaatatgaaacattacaattatgggatattgttctttggatcactgaaaagtttaaagcatagctatatatgcacctttggaacacggttgcttcgatattaacgtttttaaaaaactggagacttgatgcatagtttactgagttaaacctctcaagaatgtctctgttctgtttcaaaacacacaaaatcgtcagaaatttaggatggaaactgcatatccctctcagctcaagatatgcagcttaaagctcttttaaattttaggcagtgtgaaacattgctttacatatatggaagttacttaagcaacaaaagaagcaagaagccaaaagagtgacctgacttatgatcattgacaaaatctcgaatccaagacacatggcgtacaccggaaaatgttctccagcatcatttttctccataactttctgtgagaaacataaggatttcaaaagactattacgttgtacagctcagctaacacatgaaagcaacagagagtgtttgcataatgagaacttacattgaagattttctccacaacatcgtaatataaccctgttttagcccaaccacctgtgaatatcacaccatttaccaattctagcttctgcaactcaaaaatgaaattcactaagataacatgaactaattttgacaagcaatagccaaaacaataacatggtaacatcaaccttgaacttatttcaaattgcctgtttatgtgatgtaaacaaatcaggtgtagccaagttcaagtagaataaatagttgtaagattagtgattaaagaaggctacatagtgaacggaatccataagagcaaaatcatcagagtaaacctgaaacaagatttcttcaggctcgttgtagataagaggaatcacacgagctccaccagtctcagctaacttcacatacgaagctgcgatgtacgatatgttcgtcgcgtaggcgtagtttttcagagagtgaagacgagcgtcccatcgaccttcgccagggtgggtcagaatcccgatgaccggcttgtagttgaggtttggatcagccgcggagcatacaggactaagactaagagattcaaagacgcgggaatcttcaactccgatttgacttgggaggaaaatcgattctgcagatttcaccgcgctaacatcaaagaatagtaacgataagaagaagcagaatctccacatctcagaggatgaagatggcacgtctccaatggtggattgttcacgattttagcttttttgttttcatatcaatcattctgcaggatctgtcttgtcaagtgacatcatccccaacgtccaccatcatttaaaaattatataaaacagaaaaaaaaaacgtttgtcattaactgagcccactcgcgcctctcagagtggtttaactttatattgggctttgactgagcccagtccaacatttgtcattaaaacgggtccgtgccatcacctatgcccgttggcgtcgtaaaacaatttccattttcaagcttgcgttttttaaatggaggagagaagaagaagtaacaatgacgtcaacgatggaagggcaaaagcgtcattgtaaattaattaaagtcggttacaattattattttcccatttttcttaagtagtttattaagattaacaactacttaatttccattttttcgtaagtagccgttagtgatttccattttttttatccacgctcctgttatttacatatacggagacgagagtttctcccccatattaagattgtttgcaaactacaatctcttacccttgttgtttttcgtcttcattctttcatcacacgtatgattccgatcgactaaaggatcaccaatctcaacctgagagagccatctatctacgatcaggttacttagttatagtcgttctctctctttcaattgtatctatttctgtttcattctgtcatcgatgatttgtaattccatacattagggtcttctagggttcatcgattctcttttcattgttgtgtgactctgtttttctgatttttgcgtgtcacagacttgtatggagtgattcttctcgggtttaagcaagtaaggacgaatggtaatagatttttgttactttaaattgattttaaaattggattttgatttgctgggacttagtatcttctttgttcttcatgtatagagttcttttgactgtttgacaacacgtgaatgctccgatctcgatcagaaattggtatagctttcttctgtctgtttgataacacgtgaatgctccgatctaatgtttcgttcactggtatgtcttttcgacgaatgttattgttcatcaatttggaatttaggaatttagcctcttgtttggaatttaggatttggaattttagaattttggaattttggaatttagggctttagcctcttctctactaatagggatttggaatttgggaatttagggatttaggtgaatgttatttttgttcatcaatttggaatttagggattcagcctcttgattttttatttagttttacctcaaaatttttatttttctctttttacgatagcaaaagttttttttattttaattaaacgttttattatagatatattttggttttaaaagtgttaaatttcaatgcattgaaaacaaccggattgagcatcccgtcccatcctacgggttcgtaagaggtgttattagttcaaccgcttttcacgcaagtagatttaactcttagattattttttatggtttttgttataaataattttattatgtaaacttatttttttaactagagtttttcttatataaaatattttggttttcaaaaatcctaagtgttgaatttcaatgcattgaaaataaaccggactaagcatcccgtcccatcctacaggtccgtaagaggtgttatagttcaaccacttttcacgcaagtaaatttaacttttagattattttttatggtttttgttacaaatatttttattatgtaaacttattttttaactagagtttttcttatataaattattttcgttttcaaaaaaaaatctaagtgttgaatttcaatgcattgaaaacatccggactaagcatcccgtccaatcatacgggtccgtaagaggtgttattagttcaagcgcttttcacgcaagtaaatttaactcttagattattttttatgatttttgttataaatatttttattatagaaacttatttttttaactagttttttcttatataaaatattttcgttttcaaaaaatctaagaattaaatttcaatgcattgaaaacaaaccggactaagcatcccgtcccatcctacgggtccgtaagaggtgttattagttcaaccacttttaacgcaagtaaatttaaccttttgactaatttttatgctttttgttacaaataattctattaagtaaacttatattttaactaaagtttttattatataaaatacttttaattaaaaaatttaagtgttgaaaacaaaagacctaagcatcccgtctgtaagaggtattattagtttaaccgtttttcatgaaagtaaatttagctcttaaattttttctaatggtttatgttacaaataatttaattatgtaaacttatttttatctaagcatccctccatcctacaagtccataagaggtgttattagtttaatcgcttttcacgcaagtaaatttaatctttagattaatttttatggtttttgttacaaatatttttagtatgtaaacttattgttttaattatctttggatcatattttttaatatgtttttgtttatgattttattttattttaactaatgttttcattctataaaatattttttttcaaataagctaagtgattgttaaatttcaatgcagtaaagcttcgttaatattactcatttacaaagttaaggttttgctgttttggtaatcaatctcaaaagtcaaatgttatttgctagaaagacgaatcaaacacagtttgtatcttttgaaatgtaattccaaagagataaaatcaacaagggaaatcatgcaagacaatccggctccctaaatgtaaataagagttccaaacaaacacacaagacgacgagtaaagttcttagaaacgggatcttggttgtgtaaaaatgtaaacctcgtcgtaacccctcctgcaagattatatgatccaaagaaatcgttaaaggacatcactgtcaacaactaaaaacaagagaattgtgcaaagactgttgtcctgagtggctttaccctgcgtatccacagtaagtaggcttatagttgtaaatgagattgctcagcactttctgagactctggtctgttcagtgacttcctagcttcactgcaccacattcaacccgcaatcattaagaaaactagtgcacaaaatgttgttgggaaaactgtgaaaacgttgatgagggagatcttacctgactaaataactagcagcatgctgtgtcacctggattgcatcctcagagtgtggaatcgcagatgatccccattcaaatgcatttttctacagagaattagtttagagtattaagactttttcttttttttttctaaaatcaatgttgtcaacactgagaattagtagtagaaacataagtttaattggtcagtttacctcaggatgccactggaagccagttattgggtatctctttgctttaacagttgaaacataagtctgcaaactatgatgattagatcttttcgcagagtaaggtcagattgtggaattc

SEQ ID NO: 143 - DNA, 181925 bp, Arabidopsis thaliana
gaattcctgattctacatttaaggagttggagtcaaatacgcctaaatgcataaattttggggaaaaatgagataccttttgggatgaaatagccagcgagagttgtgtcatgacgtgccatgtgagggacaaggaaaggattggtagggtgaagtctcagggtctctctgcaacaagctttgacgtagtttagatttggtacgtcggattcttgaacaagtctttcttttccgacaaccatatcgatctcttccaccgctttttctagaatctctctctggttcaacatttccgcaagtgtccactctattacattcactgcattatcaatccctactacatcaagatcctgccaaaaccaaaaagaaaccataacttatcagatatataatatacaaactaattggtagtaattatatgagtatatttctatcacgaaccacagagagatgtgtgatttcttgcggggtaagcaacggcttcccattctcatctttaagagtgaagagaatgtcgagccaatccttgatcataggaacatcattcttcgtctccgcacgattgtagtctttattctgccccctccacaactctatcttctcatcgataatcatcttattgtacctagcaatcacatcaacggcttctcttaactcagcctcctctccctggaggttccatcctcttaagaaagggtagtaatcggctacgtaaaagctaaagaaacaatcaagagccgcgaaaattgcgtcaaaatgttctttctccataagtccgagactcccgtccatcgtcgtctccttgaaatgtctccgaccaaacaagagtctcatcttcacattgtgtgtgtgagtgcacacaatatctctcacgttcactacggcgccgtgttttgtcttggactcatctttgttgtataggttatgaacatacgcgaggaggttgtcggattctaagtttctaactttgagtaacaagtttaaagcctttgtagacattaactccgacgacatcactttcttcatcttcatttgtctctctccatactcgtcgaacactaccccattgtacctaccagttttgtaacgtttttacacatggtaatacacaaactcttatacacagtttgcaacatatacgaaacatatatgttaacaaataacagtatttttgtttagtcgagctaagagaactataagcttttctaggaattgctttataatttgaactaattttcaagtgaacatttcagctttgttatcaaattcaaaattacccaattaccccaaaaaaaaaaaaaaaaatcaacattacccgccactaatgtactcggcagagtaagaatctggcctgtccgcaaaaactgcgtctttctctcgaacgacttctcgggcaatcacatcggacgttatgacaatgacgtggacacgaccaaaccggaagcaagctatatccgtcttcatatcgttcattacacgaactatccatttagaggttggtcggttcttgagcattcctactaagttcccaatgatcggaaatccccgtgggcatggaggcagtttcttacgacgaccaagaaaacgggcgacaacgctttttatgagaaacacaatattcagagtgatcgaaaatgtgacaacaactgagaagataacattattcagataataatccattacctctgctcagttggaatatgtaagtaaaagtgtttctcttatattccaatgatatacaaagagagctatatatacaagatgagccttggagattctaggtataagctaactgtaaaatgttccttaaacagagtaatgagatattgagacataattgagaaatcactgtcatatctctaaacagaatacacatatgtaaaaaatgcattatatctgtacaatcttctatatacgttttttttttttttggtaagaatcttctatatatgttaaatagatcttttgtatgatatatgataattatgtaaaatctaaaaatttggagataagtatgtgatttttaaagaatgattactggttgattgatttggagataagtatgctatttttcataaatcaaggtatcaataacatctttacaatattttatttttacaatcggtctatataaaaatataaaattccgtatatcttctattgggcccaaacaaactttgttctcagcccataaattccatcatggcccaacaagtattaaggtcagactaggaagatgccagcagggaaggagtgggcacgtgtcccacatcattaatttgtactattccgatcatttattgggaatttatccttagcccacaccaacgaaaacaaagtaaaccaaacagtactacatcacatttacattgaagaatatacctgaccatataaagaaggaaaacattcaattttcactgtcacgtgaccttctaaatgacgtgttctcttcatctttcatgttgttgtgttcgttgttgcttttaaatactgtatgcatgtatgtagtgcaactagcgaagtactaacttcgaacaaaaaaataatattcttttgcaaaattatgaacatggaattacatttacttcatcctatttttgttaacttgttttatcgattttcttttagtatacatgtatagttttttttattcgaactctagattgattctaatagagatcaggaccaaagctaaccagtgcgctaatcaactcgggatatatcgtattgtttagttcagcagaatcgctattcttgtttacttttttttgcatctcgacattgtcgagtctctgcctcgatcaaagtgtgaatatttgatattgatatgatttgtcttaccagttgccacgttaccatcgtgattaatgattaatactacttttaatcatatcaaatggttttttctcacaacaaaagagacaagtgaagataataatattatttgtatggccacgattcatcgatcaaacgggattagtcagtagatttgattttgctttggacaaaaagtagaactgagaatcggcgaactcttgttttatttattttattatagaacaataggtaaatatgtaaatatcttcaatgcctacttacgtttatattatacgtaataatatattatagtcaacattcaaaagccttgttttagaaattttagccaaatacccgttattatacacttgaatttaaacgtagattattctggaggcggctcttaaactaattatctggaggctctggattaatttattttcttaaattcgtggatattttagatactattaccatcagtcttgtatatatatatatagagaaagcgatgatgataaaagtataaaactattgactccaaaaagagaaaaaatttttaaaaaatgaattagatgttttcatccttacccacaaacgattcatagtaacgtcaggctcattatccacagaataatcacaccaatgtcatcactatctaaattagaaaatgtaatatcaaacaaaattggggaatcgaaattggttaaattaacagaatttgcactggtctgattatttatactctgattattaatataacacagaaaagcattactctttttcttacacgcgtttatgttttcaaaaagaaatatttatccgattacaacaattatatggagtcataacactgtaaacaatttgtacaccacatttttagaaaataaaaatttaacttgattacaacgtggaaaagtcaacactttccgagctttccttttataaaaggaggacggaagactcgccgtctcaaatgcttccacaaaacaaaacaaaacaaacaagaaatcccaacaaacaaacaaacaaaaaaagagagaaaaagaaaaaagagaggtgaaaactcgtgcaacatggcagaaccaactcagccgcttctgaccgattccaactcgtcatcaccgagatctctcgacgacacaatcgagagttacattggaagctttgggtgggctcagtttcttcaagcggctttagtctcattctccggtgttttcgacgctcaacaaactttcatctctgtgtttacagactccgaacccacgtggcactgcaccgactcgaactcgatctgccatgaatccatctccaacatctgtatcctccccaaaaccgcatggtcttgggattactctcctcacgtctctgttatatccgaatggggtctccaatgcgccggctctttcgtcaagggcttaccggagagttctttcttcgtcggatgtttaatcggaggtttggttctctcaacacttgctgattcttccttgggtcgtaaaaacatgttgtttctgtcctgtctcgttatggcgatatcaacgatgctaacggttttctcaccaaacatttgggtttacgctgttcttcgattcgttaatggatttggtcgagcgacgatagggacatgtgcgctcgttctttcgacggaattagttgggaagaaatggcgaggacgagtagggataatgagtttcttcggattcatgcttggctttttgtctcttcctttgatggcttacatgaacagaggaagttcttggaggattctctacgcatggacttcgattccaacgataatatactgcgttcttgttcggtttttcgtttgtgagtctccaaggtggcttttcgttagaggccgtagagaagaagctatttcgattctcaaaagggttgcttcgattccgtctactgatgtaagcagtggtggtgcaatatctatgagtttttcgagcttaccttttgaagaagatgaagagaagcctagtactaatgttaacatcttcacgaccatgaaggtgttggtagagaaaagatgggcgcttaagagattatccgcggtaatggccattgcgttcgggattggtttggtctattacgggatgcctttagcgttatcgaatcttgatttcaacatctatttaagtgcagcgtttaatgcgttgatggatttaccagcgaacctcatcacgcttttcctagtcgataaactcagtaggagaaacgcgcttatcggatttacggctttaggtggagtctctagcgttctcatatttgcgttacataatatgagaattggaaaccacggggcgttacagttggcgttagagctaatctcttactttagcgcgtgttcggcttttaacatggagatgatatacacgatcgagctgtttccgacatgtgtgagaaactcggctatcgcaatggctagacaggctttggtgcttggtggagttttcagccctattatggtagcagctggtcggaaaaacgcgttctggtcgttcggattgtttggtcttgctataggtttgttgggattgtttgcagttggattgccagagactagagggagtgatctatgtgacactatggacgaggaagagtgcaaagaccggcggagtaaagtcgccgttaataatgtcattgcatgaaatggtgaagaatttgaaaacacatgtgaaattaatgtagatttaatttagtatttatcacttgattacattaagacttaccacatatctttttttttggttagttgaaaagtgtttctaagaatgagccatcaaagcaccactctgatgaaacaatctcattttacagtttacacctataacacatggatttcttgaataacaaaataattcaaatttgtctcgtttggatattgatgccgatggttaaacgtttggctgtttgatttttgttagagataattgtgtttctgttctaattttcacacgttgtgtgaaaatgaatcgttccaatcccaagaaagtatattcattggggttgttggtagttggctgtttggtaattgaatgggaagaacaaaccagacagaaatttgtacacttcttggtagatatgtttaaaaggtttaatttacaaataggcccatctatcagcccttttgtaacccttttaggcccaactaagtggtctcaaagttcacaaacccaaaacttatgtggatttattattttaagcccacacaaactaacgaacggtgagctggcaagtcacgtgatgacacgtgatccatcaacccatcacttaccattaccccaaccggtacggaagtggttttgtatcttcctacttcgactcctcttgggtaattataattagttttagatgaaccaaacaatcccaaaataatattagaaaaagggaagaaaatctgaaaccaaaaaaaacgagaagggagtcgaagaagaacctttcgcgctctgacgaaattcattacttacactggatttatactttttttgtcttcctctctcaattatctccttcaacgccacaagatcctaaggcctctcacggatctctcttaagatcaatcgccgcggctcatgacgcagtcgcctgttcaaccgcctccgccgctcccagctcagccgcattccgccgccggaggtgtaataagaggcgatgtacaggttaggtgcgcaggctgtcgcgtgattctgagggtgaaaaccggcgttgtggagttctcgtgtccgacttgtcaacttccccaaatgttgccgccggagcttctttctagggcacggccgcagtttccgcagtctccacaacaaccaccacagccaattcagacgcttccgccaccgattcaacagcagcttaagcctcttaatctacctaggcctccggttccggcacatggaatcgatccgacgaagatgcaattgccttgcgctaactgtcaggctatcctcaatgtgcctcatggactcactcggttctcgtgtcctcagtgccatgtcgagctcgctgttgatgtctccaagcttaatcggtctttaactgcttctcaatctcattctaatcctcctactcctgctgctcccacagtcccgcctccgcctcctcccgaagaagtcaatgaggaagctattgaagtggagagagaagaagatgaaggtggaacggctggagaaacgtttatggattatgtgagtgcctcatcttgagatcatctttttctgtctgttcaatgtttttgatgatactaatttgtttctttgtgaagcgtcccccaaaactttcgatcggacctcctcatcctgatccaattgtggaaacatcatctctatctgcagtgcaacccccagagcctacttatgatctcaaaatcaaggaagagcttgaaaggtcaaaggctttatcgtgtttgcagattgagacattagtttacgcttgccaggttgcttttaaatggcaaaaagtttggttaatggcatttaaacgtatcttctacctgtatgacaatggttttttttttattacagaggcatctccagcaccttgctgatggtaccagagcaggcttttttgttggagatggtgctggtgtgggcaaagggcgaacaattgccgggttgatttgggaaaattggaaacatggaaggaggaaagctttgtaagtcttgtagaaagatacttctgcgccatttacatccttgataagatattgttagctcaattcaatctgacttatgattatactacatttgcataattgtgtctacggtgtccttttttggtttcttagataacttaaagtaggatgagttctaatactatttgctccttttcctttatgatttacataggtggatttctattggctcagacttgaaatatgatgcaagaagggacttggatgatgtgggtgctacatgcgttggaggtattatcttgattttggctgtaaattaagtttgtaattcgcttattttcttgggtcacaaatgcttcatatgttatacataattacatatagcttatgctataaattattttctggctcattgttgaatagaaaattttgaaagtggatggtatagagtagactggatcagaatgagattctgactttgctgaatggataaattgactcatgctttaatattacgatgtagagtacacatgtatttttagagaacttattttctttactgataaaggtaatgggtccctgaactttgtttatggtgtcttcatgcctagagaatgttatgggtagctgatgtttgtgcagttcatgaaaatttcaggtaaataaaagttggactgtaactttagaatagtccaataggatatttgattcttagtctcattaatcctttataggtttgagcttggaattttaatagaatattaggagatggaaaaatacgacaaatcaagggaaccatgtcgatggataagttcattcaagtgaacaaatgtccagtttgttttttctgcaactaaataacaatatgtttgacgtgcagtgaatcctttgaacaagctaccctattctaagcttgactcgaaaaatgttggtattaaagaaggagtggtattcttgacatacaatagcctcattgcttcctctgagaagggccgttctcgtttacagcagcttgttcaatggtgtggaccagaatttgatggtctcttgatctttgatgaggtaacagttctatgaatgaagtatattaaattatttgcgttaaaatcatcatccccctttttttgtgaattgaacaatttgagtataccctgtcgttgtaagttgcttgatcactggttttatcaattttgggccaacctctaatctttagtacattgtgcaggtactaatttgttttccttttttatagtgccataaagcgaaaaatttggtacctgaagctgggagtcagccgacacgcatcggacaggcagttgttgacattcaggtctggctacttgaaactgaatgttcttatcagtgttgcttttaatattgctcttggctctgaagagtgagagattatatacttcgacttgtctttttgggttgtactttttctcggtttcagataatatagtgtatattctagtttaacatgcttaatttgtggttagtgccatctagttgactctaactaatgaattctggaaaagcaggataagatcccccaagcacgtgttatttattgctcggctactggggcatcagaaccacgaaacatgggttatatggtcaggcttggtctttggggagctggaacaagttttagtgattttaacaaattcctaggttggttttcttttctactcctgttgattaattgatttttttttttttgtgtgtgtgtgtaacatttggattagtacgttctatcttatagttcgataaacatgaattcatttaagtgtcaggttttagcttctgtctagagcatatacaaaatatttcattaaatgaagtttgaccgcattcactgaattctaataattacttcgcttctcttactctaccttatgcattgcataacttggaatggaactttaacacaactttgtgcaggtgcccttgataaaggtgggacaggagcgttggaattggttgccatggatatgaaagcgaggttttacaagccgtgtcatactatttagccatttgcattgctcataattcattctaacaccccttctatgtaatagggggatgtatgtatgccgaaccctgagttacaaaggggctgagtttgagattgttgaagctcgtttagaagcaggaatggaggtaaatcatcttctatctaatattatgttgcttgattgcttctcatatcttaattgactatctagctctatataaatgtcgtgtaagctcaacaaagtagtatatatgaagagtagggggtctctgaggtagcttgaaccaagttcttacattaatttctgtctgctttattgggattagataattttcaatggtgctttgatattttttggcaagcaagctcattatttcgagtgttcccctgtttatagtttagagatccctgtcgaaaaattaaaatcaggacttttgtgctgtattactcgctttcttctgtaggcaatgtacaataagtctgcagaattttgggcagagctacggatagagttgttgtcagcaagtgcttttctccctaacgagaaaccaaattctagtcagttgtggagattatactggtcaagccaccaggtataatcttaccacaggcaaaagttagacaatgttattactgttgctgattggtcaatctatttcatgtctgttactgcagcgtttctttagacacctgtgtatgtcagctaaagtccctgtaactgtgaggttagctaagaaagccttgtcaacaaacaagtgtgtagttattggccttcagagtactggagaggctcgaaccgaagaggctgtaaataaatatgtgtgtttctcttcatactacttttggaaaaaatattaagtatccttttttgattccatctaactaatgtctacgtattgataatcttttcccccttttttcttggcatagggtcttgagcttgatgattttgtctcgggacctcgagagctcttgttgaaatttgtggaagagaattatcccttacccgagcagcctgaacctctgtcaggtaacttactctctgtaagaggttttgcttttaaatccctggtggtttttatttcatgttcatagtatgcctcttttgaacttttacagaggatgatagtgttaaagaacttcagaggaagaggcattcagcttcacctggtgtttcaattagagggagagtaagaaagatggcaaagtggaaaccagatagtgataatgaaagtgatttggagtctgaaggtgggtttcctagtgaaaacatgtattctggtacatactgaacagacacaatattgatgcttaggctgtagtgaaaaataatatgggaagttttgaatgtagttctttaagcgctggaaaacgtatctattgaactggaaatctacgtagcagctaataagcttattaatttatcccctatgtattagtattactatatatctccaatattggaaattgcttaagggatgacattatcatgttttgggacaagtattatcctcagatctctagtctttgtatttgccccatcttggtctgtttcttcaatcattcgaattttataacctcaaggtctgtacatttctaatcattagtgttttcaatgcagctgactctgctgacgattctaatgattctgatgatgagttccagatatgtcagatatgcagtggggaagatgtactttacttttaactctgatagcttgattaccgttgagggttacgagattttaataacttgtctggtgatgaaactaggaaaggaagaagttgctccattgttctgaatgtgacaagctttttcatccggactgtgtggttcctccagttatagacttaccatctgaagcgtggatttgcttttcttgtaaggaaaagacagaggagtacattcaagcaagacgtctttacattgccgaattgcagaaaaggtctatacactgaaatagcaacttgtgtctggtacagaagcaaagtattagattctttttaagagtggttacccattttgtttctttttaggtatgaagcagcgcttgaacgaaaatcaaagatcatagagatcatccgttctctgaatcttccaaacaatcctttggatgacatcgtcgatcaggtaactatcatttacgtctctgttttttctcaggtatgaagcagctcatggttatacatgagtctcctttctttttagggtataacgctagtggtatctatgaatcatttattcaagttttggcatctagtatccaaaggctaattgtgtggttaaattaacttctgaaaactttagaatgtctctaaattgctgtgctttatatgtactaatgcagcttggaggccctgaaaaagttgcagaaatgacgggcaggcgaggtatgcttgtaagagcatcgaatgggaaaggtgttacatatcaagcaagaaacacgtaagctttcattctcagtactttaacttattcagcactagtaatctgcttttcatccttgtgcttcttggctctagaaaggatattaccatggaaatggtcaacatgcacgagaagcaactatttatggatggtaaaaagttggttgccattatttctgaagctgggtcagctggtgtttcgttgcaagcagatagaagggcagtaaatcaggtgtgtcgagtttataaattctcctactaaataaaattgtcttttttttttgcgtattcttattgttctgtagatctaagttaattgtcagagatgacctcagaggacttcacatgtccgctttgggggtattagttgatttggaattttttatatatgtctgcagaaaagaagggttcacttgactttagagcttccctggagtgctgatcgtgcaattcagcaatttggaagaactcaccggtcaaatcagacatctgcacctgaatataggttgaatgacaacgcttgtgtttaattttgtatccgtccaatagcaaaagtatgctgttgaagttgatagttcttttgttttggtcctgtcagactactcttcactaatctcggtggggaacgccgctttgcctctattgttgcaaagagactagaaacacttggtgctttaacacagggagaccgcaggaaagtccctttcttaactatttcttagttagtcttttggcttgttattgcttaaaaccttgccatgtgttttgtctcaaaatttggtgtggtgtactgcagggctgggccctccgggccttctttgagtgcgtataattatgatagtaactttggtaaaaaatccttgatggtgatgtatcgaggcataatggagcaggtattcctcataaaagcctgtagtctcttaactccttaattttgcttcttcagtatttaggaacaatgataacggataaagtgtgaaatatagtatggcttaattgtcaggagaaactacctgttcttcctcctggatgctcgattgatgaacccgaaacagttaaagagtttttgaccaaggcaagggctgctcttgttgcggttggaattgttagggacagtgttctgggtatgctttgctcgtaatttctctttttccgtacagaattcaaattctagttgtagtaatctcctttcttactttacttcattaatgatacagccaatgggaaagatgttggaaggttttcaggacgtattattgattctgacatgcatgatgttggacgatttttgaatcgcctcttaggattgccacctgatatccagaataggtattatgcgtcaattggaaatttgctctatgtaacttaccttccattttaaaagcaacttccgtttgtattaatgctttctattcttgtgctgtacaggctgtttgaattgtttactagtatattagacgttcttgtacataatgctcggatagaaggaagttttgactcaggaattgtggatatgaaagctaatagtgttgagctactgagcactccaaaggttgatgatatgtcttacttaattattggttcttggtgtatttttgctactaatatttgaatttttcagaccgtccatgttgatcaaatgtctggtgcctcaactatgctctttacttttactctagatcgtggtgtaacatgggaggtacttcaatatctttcactcttggtaaacttagtcgtatttcactgcactcaaaagcttgatttgatctgtgttccagtctgcgagttcaatgctagagggaaagagaagggacgggcttggttcagctaatgatggcttttttgaatctaaaagggaatggttaggaagacggcacttcatattagcatttgagaggtaaatcattatcctcactactctttggataatgtggtccttttatacaaacaaatattagaatactaataacactatcaaaatctcattgctgactttgtcttggatttccagtgccgcttctgggttgtttaagattgtacgtcctgctgtaggagagtcgatcaggtatctactacaccattggcagaacctttacatttcgtatttctgactagaaaaagtggtcttaactattgtttattttttccagggagatgtctctttcagagttgaaaactaaataccgaaaactatcttctctggagaaggctcgtactggttgggaggacgagtacgaagtttcatcaaaacaggtatgcttcccctatcaaaaataaagttgagaatacatagaaccaaagcagaaaaatagattagcacagaatcatcgtggcgtaatatagtttaagcctcacaagagattcataagtcataaccattgatatagcgctgttcattaaatgagtttccatctgagtacagtgtatgcatggacccaagtgtaagcttggggagtattgcacggttggacgtaggatacaggaagtaaacgttgtgggtggccttattcttcccatctggggaaccatcgagaaagctctctccaaacaagtaacaaagaccattcaagaatttgtgagactctctcttagtgtgttggcatggaaacttatatgtatttggatcttttgcaggcccgtcacagccacaagagaattcgagttatacgcatagagactacgacggataatcagcggatagtgggcctctccatcccaaatgcagctgtagaaactgttttacaaggtattgcgagcttatctcatgatcttgagacatcatatgataaatccgacaaggaaacagaatggttatctcgacagtcgttgatttgtgtctgtctttttgtttctgcagatttagcatgggttcaagagattgatgattaagacaacgagtatttataagaagcatacaccctcaaagctccacaatcaagttcccatgcctattttgtattttctttatttaagaaaaagaggaaaaagacacttgactttcatttttgtgtatatcacatgacaaattggcaagatgatacatagatgtaatattatttatctaacaagattcattcttatgttccgttaaaaaaaactttttcttattgatgtgcagaatacagagagttaacaagaaaagaaaaacaaaaaataatttcacaaccaacataatagatctcaataaaacaagaagaattttagtgtttcacagaacacaacacacataacttgtaaattacataaatgccatcaaacagcaaaaaaaaaaaacaggcttatttttccgaccagaaacttcaatcaacgtgtcgtacgtagtaaaaaacattcaataaaacctctgttttcaacagatgaaaggagcgttggcataaccatcatggcaatacaaacctggctgctgagtaaacccttgcttcttcaatgccttcctagcccttgtaaccatttctctgtttgatatctcaccgtctgtctcctccaatatcgtctgtatcgaattgctcatcgctccataagcctcagttggtttccccgctggagtcgcatcagcagaggtctgatcggtttggcaaccgctgatcagtatcccgctgtctggaagcggaaccgaacctcttgatccaccagcataaacctcttctttactcccaacgtgtgtctgcatagcgggtttcacatagtcttcatcgtttagtttaccctcaagaaaccctgaagccaatttgccaagcattcccattaatccaccttcttctccatttccagcctgaagcttacctaagatcactttcataaacttcttcactttcgggctcgaatcatcaccaaacgcatcaaaaaggcttggcctgattttcccaacttcgatattatcattccctgtttgctgcttgagaatatcaatcaaggtctgcagaggaagagatttgtctttggcatggatcgtttctccgtcttcaagctcaatctccttagtctcgatttcttccgcctcatcttcatccttcttgttccctccaatgtgaaaccctcgagactcgatggcgccttccactttgctgcgcaagaacttcctaaacccgaatcttgaagaagattcttcagattcatcttcgtcctcggcttctttcttagtgctctctccaatctgctccttggcttcgtcgattaggccaccactgtgacaagagtctgaaatgattgtcattctgcaacctggaggaaccttgtccacaagatctctaaaatcatcatctggaaacaacaacattacatcagcaaagctccatggacaaattccaaagtcagataccaagaatatattccccttaaagattccttaatttcgtttgatcctagtttttctcagctatgactctatgagagaccaatctcgaaaataagatcaacaattctacaaaaaatcaaaacttttccatcaaaagattcttctgattattataggatcgtcagatcgtagccatcaatcacaaaaaaaagagagagataaaactcaccagtaatcagattcatgtcgcaaggaacaatacactcgtcgaaaccagtgtcatcgtcttcaccagtctcagccggcaacctcgtaccgtgtccactgtaatgaacgacaagaacgtcgccggaatcggcagattcgacgagatcagcaagcgcgcggcggatgttcttgccagtaggctgagtagaggattcatcggtgtcgatgagaacggtgatgttctcctcggagaagccgtaccgttcaacgagacatttgtacatacgacgaacatcgttgacgcatccccgtaactccgccttggttcctgggtaattgatcccaataagcaccgcctttttcgtcattgagaaaaaatgatctgatcgataaaactctctgaatctgatcggattatctgtcagcgatccaatagcttcttattccgaccaaaagtgagatcgatcttatatattatatttacttttggctaagattatttctttattcattcatttcattgattgatatgcgcgtttccacgaattggaatgtattgtctgacgtggcattggatttgtttgattttttgtttattgtcacgttattgcacgacgactagtcactgactcacaaatgagcattattattcttaccaaaacaaaaaaaaacgttatttataagaaaaactaatcaggtttaagcccaacaagaggcctaatttcggcccaacttgtaaacggagccgtttaattaacacgcctgggtttgatgctcattgtcatctccaagacaaaagggtcatcaacaaagcctctcagtctcaggctctcagctaaccaaatcaaaattagtaataggaaaacaaaccaaagtcatcaaaaaaatggaaaccggatctaaatttaaatttcctctataatcccaacggttagattaataaatatgatccccaacggttatattaataaaaagtatatcaaatcgcaaagacacgcttaagagaaaatgggaataaaccaagaaccttgtttgcttataaatacactctcacacattcgcttcctcttcttcttcattcttgagaaatcaaaataaccctcacgcattctcttcttcttcttcattcttgagaaatcaaaattctctgttcaccttcttcttcttcttcttcgtcgatgatacacaatttatcatctatttctatttataatgcatgatcgccgatgattatacagaatcaacattgaagcaaagcccctgagttcgagttcatcatcgtggttgaatgaatgacgtctccttcatcatcgtttccaatcgagaaggggtctcacactaaattgattttagaatctcttaagatgaaaatcaatctatcgatccctgacgaaacaaaacgccaatactcctatgaaaccctaagtaacagaggaagcccatgtttgcttcttcgcattgcaatcaaaaatctgtccgatcagatcgagggagagaggatgaacaagatcacacaaacaaaaaaatcagagtcatgtttcgtcgatgtcacaaagaatgaatcttcttcgtcaaattggatctcgtgcaagtggtggaggtacagaagaacggtgggctcacgtttgactttggaatggggttggctgtatgggccttctttgctaccaacaaggtattccttttttcatttcttatttttattttcttcctttttatttgttaaaaattagttcaactatcaatttagttttagaaataatagtgattatcactaaattacattttaaagtttaagaaaataatattaatttcattattatttttaaaaattagttgaagtgttaaattttgaaatcgtcgaaactaaccgcgcctatgcatcccgtcattaattggttcgtaagctttgtggtgttcgaagttcggggatgttttcacgtaatatagatttgacacttcaactcattttaaaataataataatgattttcacttagaaattaaaaccaatttaaaatttaaactttaaggaaataatttataattttaaactaaaaccatgttaatttcattattaatttttaaaaattagtctaagtgttatattttaaaaacgtcgaaaactaaccacgcctacgcatcccgtactaagttggtctgtaagctttgaggtgttcgaagttcggagatattttcacgtaatatggatttgaaacttcaactcatttttaaaaaataataatgattttcactttaaaacttaaacttaaggaaagaattaattatttttaactaaatccatgtaaatttcacactaaatgttgtgaatatatatattttttttctttttcaaactacagtaaaacctccataaattaatactcgataaattaataacctctataaattaataaattattccggtcccgagttcggaccaatgtaaaaattgatacaaatcaataaattaataagataataacttttttgaaaatcctatataaatatatagtcccatcaatattataaattaataattatgtaaatttaccaatatatacatatatatatatatatatatcaatattatatgtaaaagatttattaaaatatgactctagtattattttttctttcatttcagttaattatttttagagtttaattctaaaatttttattacatcgaaaaaactttttattattttttaaacttaataattgttttttgcttctaattagttttagaaaaaattattgattataaagaaaaaactacttttatatcgaatttttctaaaaattacaaaatttgtaaaatctttctataaattaataattattaatctttctataaattaataaattaataattattaatttatcgataaattaatacttctctaaattaataaattttctcggtcccaacattattaatttatagaggttttactgtagttcaaatgtgaaattttaaacacagttgtaactaaaccgaaaaaaaaaaaaaaaaacatcaaacaacaagtcacataacttattcaacaagaaagcttttgaaccaaaatacaatccttaacaaataaacggagcattcacaaaactatcactgcaatatagtcctggtcgttgagaaaagccttgtttcttaagaagcttccttgccttcaaaacaagttctttgtatgtaatcataccctttgtctcctcaagtatgatctgcacagcattggtgaatgctccataagccatttcaggatgaccttgaggactcgcgtctgcagaagtttgatctgtttggcaaccactaatcaaaataccgttatccgcaagagaaccattgctcgcgcctgcatagacctcttgcttgttcccaacatgtgtcttcatcgcgggtttcacatactcttcgtcatcgtttagtttatgcttaagaaactcttgagctagtttcccaatcattcccaatatcccaccttcagttttaccttcttgcagctttgttagaatcactttcatgaacttcttaacctttggggatgcatcttctccaaacacattgaaaagggttggtctgattttcccaacttcgatatcattgttacctgtattttgcttgaggatatcgattagagtttgtagaggcagagatttgttcacgacatggacttttgccccatcttctagtttaagctctttagtcttgttttcgtctttctcatctttgtggtgaggaatggcgatccctttagattccagtgcttcttccacagcttcacgcacaaagcctttgattccaagtcctgaagagcctccagattctttctttggcttcttcttcgtgctctctccgatctgctctttagcttcatcgatgagaccaccactgtgacaagagtctgagatgattgtaatgtgtgcttcctttggtactttctccacaagatctctaaactcatcatctgagaatatatgaaaacgagtgaatttgaaacaatagcaaaaaaatcttcttgaattgatgaaataattcaactgatttttgaccaaatgcataaaaacataattcccctgaatctaataatctaaccaaaaaaacaggacaaagttcaaaaatgtcaatgtcaaatctaattatgacttaccggtgataagattcatatcacaaggaacaatacactcatcataaccagtatcatcgtcttctccagtctccgccggcaacctcgtcccgtgtccactgtaatggacgacaagaacatcacccggtttagcggattcaactagattcaacaatgcccttcgaatattcttccctgtaggtttggtggaagactcgtcagtatcaatcagctcagtgatgtttctctcggagaatccaaaccgatccacgagagatttgtgcactctccggacatcgttgacgcatccccgtagctccgccttggttccagggtaattgattccaatcaacacagctttcttcgccattgaagatatctcaaaacgtctgcgttacaatttttttattctgatcgtgagctgttacatttggtccttcattcttttataacaatgtttaacactattaaattaaagaagccttaataaggttgccagcaaaactttaataataaagttagttttatatcgtcataatttccataccatatatatctgttggaaactttgaaaactaatgttttaattgaattgtagtcaaaaaaatggtagtaaattacattaatttttccttggataaaataattacattaaaattaagggatgaaattatattctaactcaaatattcaaaattctagccgtttagagaagaagaaaacgtctatggcttgtccattttccaaccaaagctaaaacgtacaagtatagaactatatattgtgaaaaaaatagtatatggcaagaaatttacgtatcttcaaaccaaataattacgcaaatgtcgcttgttattgtttatagcctctcctggtatgatggcacacacaatctataaatgcttagcacgtcgctttttactaatcagttccatgtcaaattcttataatggaaaataacggttgtatttcttgtaccgtaaggtaagatttacattaatatagggataaaccattaattaattttaccacaaattaaaaatggtatgagcaaaactaaacttaaaaccaaacagtacttgggatatgaaaatattcaaattaaagtcacaacaacacacaaatcagaaaacttattccacaagaaaccaaatcaagaaacaacaaaaacttcccaaattaatcaacatataaaccgagcattgacataagcatcattgcaatacagtcccggtcgttgatcaaagccctgtttcctaagaagcttcctagccttcaaaacaagatctttgttactaatcttacctttagtctccccaattataatctgtatagcattggttagtgctccataagccaattccgggtgacccggtgggcttgcgtctgaagaagtttgatcagtttggcaaccactgatcagtataccattatcaggaagtgcaccatttatagcacctgcatacacatcttggatcgcgggtttcacatcgtcgctaagcttctgctccagaaactcttgagctaggttctcaactgatcccaatacctcatctgaaacagtttgaatagtagtagtagtctcttgtaggttgcttagaatcacattcataaacttcttcacctttggacttgaatcatctccaaacatatcgaaaagggttgtcctgattttccccacttcgatatcatcgttgcctgtttcttgcttcagcatatcaatcaaagtctccaatggcagagatctgtttcccacttcaattatctctgcttctgtctccttgttgatcgttgaagagtctccagagtctttcttcttcttcgtgctctctcctatctgctctttggcttcatctatgagaccgccactgtgacaagagtcagatatgattgtgatgggacaatcctttggcaccatatccacaagatccctgaaatcatcatctgtaaaacagagtcaccttaataattcataacaactggaactggtaaggaaaatttaaaattgttacgtaaacatgaaaaattaaaagtcaactttagtttatgttttcacttaccggtgatgagattcatatcggaaggaacaatacactcatcgtaaccagtatcatcatcttctccagtttccgcgggtaacctagtcccatgtccactgtaatggacgaagagaacatcacccgatttagccggttcaacgagatctaacaacgcctgtctgatgttcttaccggtcggtttgatcgaagaactatcagtatcaatcaacattttgatgttctcctcggagaatccgtaccgttcgacgaggcttatccgcatccgacggacatcgttgacgcagcctcgtagctctgccttggttcccacgtagttgatcccaatcagtaaagctttcttggccattgttgatatttcaaactctgcttgacaatttttttctgatcgtaagatgattcatccttcatgggttttataatcatcttttaaattataattattgaaacctagtgtctttttgtatgactttttttctgtcgcgtttttgtatgacattaaaaaaagaaccttagaggatattggaaaattataagctctgattttactttattttttgtatgaaaataagctctgattttatcaatctctttctcgaaatttctaggtaattaattgaaattttgttaatcaaagttataacaaattgtgtttcgaatgtaaataatttatattcattttggttgcattccatgtaatcacgtttataaatttgaataaccgtatatgatacaacctaacttgaacacagacattagatatagccatagagacaacattttctatacttaaaaaccgtacgaaacttagatagcttataagaaatagtcaaaaatatgtttaataattttgtgagaactgatcatttaaagatgattttaccttctttcttgagagcgcaaacaatctcacgttataagcacgtcgcttttgttgagccaatcagccaattattatggcttgattattgattccttctatctcaagtcaactggacaaagtctctactctctaggtcataattagattcgttgtatccgaagttgatggaacttacacacaaactagttttcatctgatcttttttccaaaactcacatttatttattcattctaacaagacaaatatctaagtccaactatccttgtttcgatgtaatgtaaacatattattaaaaaacatatatattcttctactaatcaagctaaatatactttttgaacacaaaaataaattatcttcattgctttaaaaagcttaaacattattctatttaaaaagttaagaacatttgaacacaacttgctgatgttcacactataacgagcataaaataaaataaaaatacattcttcgatttaatagtagactttacttgatccattcaggtcttatcaatgaaaacaaagactacagagagcttgttggtacataataattagcgtagatgaagggtaatattccaaataaacatgatcttcaagaatttatttcaataaatcaatttcataagagattacataccatttttttttaccatgttcactagaagtctagaatccaaaaaatagacttgcgcgaaagaagagtctctaatcagtaaccacaccatatagttacttagcatataaacggagcattcacaaagcggtcattgcaatacaatcctggtctctgaataaacatctgtttcttcagaatctctcttgccctcaataccatttccttgtttgtaatcttatctttatgatcagtctctgacaaaaccatttggatggcattactaaacgctccaaacgcttctcctttcttcttaacatctgctgatgtctcatctgtttgacatccactcaacagaatccctcggtcaggaaacaatccgttgcttgatcttcctccataaatctcacgatcgctcttcacttgtgcctgcattgcgggtttcatgtagtgttcatcgttcagcgtctcttctatataccctcgagcactttcttcgatcttaccaagtagcgtactttggtcatttgttttccttagcttggtaagaatcactttcatgaacttctttatcttcgggctcgaatcttcaccaaagacatcaaaaagggtgggtctgattttcccaatctcgatattgtcttgcccagtttgttgtttgagaagttcaataaacctctccaacggcagataccttgatctgacaacttcatctccctcgcctacttctacgatctcgcgcgtctctacatgagaacttccgattccacaaaaagcaagcagtttcacaaaaatgctatgcaaacagtttttaaactcgaattcaaaagaagaaactttggattctcgatttggcttcgtcgtggtactctctccgatctgttccttagcttcatcaatgagcccgccgctgtgacaagagtctgatacgatagttatctgacatccctctggaacttgttccactaaatccctgaaatcatcatctggcaatgcaacacacaaaacagcgtagatatataaaaaaaaaaacctcaatcatttctattagtgtccatgtcaacataattcaaaactagccttgagacttaacagagtcaaagagaggggtaaacagattctaaacagagcactctgttttaaacagagcactctgtttttcttcattaaactaaggaaccattccataataaactcttaccaggaattggattcaagtcggaaggaacaatacactcatcaaaacctgtatcatcctcttcccctgtttccggtgggactctcgtgccgtgtccgctgtaatgcacgaataaaacgtcaccggattttgctggctttatgagctccgacaaagcctgacggatgttctttcctgtgggttgagtgtaagattcgtcggtgtcaatcagcacagtgatatcttcctccgcgaatccgaaccggtcaacgagacacttatgcattctatggacgtcattgacgcagccttgtagctcctccgtggttcctggatagttgattcctatcaacaacgctctctttgccattcttgcaaccttcaagagttctttgtcggagaaaaaacttccgctggatctaacgattcttcaatgagatttgtgatgaagattaacattaaaatactaaacattattggcttagtgggaactaactttatgtttctctatttaaatgatggcacgtgaaaattgtggactaattatcaaaaaacataaaacaaatcgccgtctgtggggatcgaacccacggccacgtggttaaaagccacgcgctctaccactgagctaagacggcgagctgatacaacatttcgtaattaattattaaacttaattttaatccgcatgtgtttaaggttcttctataattagtctaagttagcaaaaattacatagtgatgatgatttgtaaggccaagtgaaactatatcatcaggatcgtgatcctataatggatgtttttcttaagtgattttatagcaaagccaaatgaaatcttaagttattctttttttacaaggttcagtgttttaggtcttatcttttgtgtaacacctactttcatataatgatatttatactcttagcgaaaaaaaaatgaaatcttgaacactaatcagtaaaaattgtcaaaaaaaaaaaagaacactaatcagtaataacctattgcgatgagtatcaagtcgacagcaggttcactttaccatttttctcacaatgttggggaataagaaatgaagaattaaaaagaatttttaagttttgcctattttttgacagaaagaaagaatatttttcctatatattttaaaaacaaatcaaaacgccgtctgtggggatcgaacccacggccacgtggttaaaagccacgcgctctaccactgagctaagacggctgaacaataattaaatcataataacattcaaagcataacctaatcagatatgttgaagcccaacaagaggcctaatatctctattcggcccaactaacataacaacgacgtttaattgacgcctggggttttctgtctccggcatagcataatttttcgtcctcccgaagcgctttttcatcttcctttgttctgggtttctctccaaaaatcgccggagaaattcaaatcgtcatctctaattcgtcggagaatccaccgttaggtatataaacacggtttgtttctgaaattagggtacgaaaaaatgcccttgtttatgcctgacgaagagctggcgcggctatctagcgacgccgcgtcggtggttgcggagagagccgacgagtacatacgaaagatatacgccgagctggatagtgttcgagccaaggctgacgctgcttccatcacggcggagcagacgtgttcgcttctcgagcagaagtacctctcgctgtctcaggatttctcttcccttgaatctcagaacgcgaagcttcagtctgatttcgatgatcgtttagctgagcttgcacagtctcaagcgcagaagcaccagcttcatttgcaatcggtgcgtccttgtgtggtttttcagtttttttttttttcttggaatccctaatatttgacggatcttccggttttgatgtagattgagaaggatggagaggtagagaggatgtcgacggagatgtcagagcttcataagtctaagaggcaactgatggagttattggagcagaaagatgccgagattagcgagaagaattccactatcaagagctacttagataaaattgtgagtgtttccctatttttgttactaataatgtgttacaggcatttttcaaatgtgtaaccctaactcttgttctatttctcaggttaagctgacggatactagttcggagaaggaagcccgactagctgaagccaccgcagaattggcccgttctcaagctatgtgtagtcggttatctcaggtcagattattgattgcattttaagatttatgtttgattgctcatgattttgattgattttattgatacctgaatttgtatgatgtcatgtaataaaatatgttgatccttttacattgtttatgacatatggtttttgatggaaacaggagaaagaactcactgaaaggcatgccaaatggctagatgaggagttgacagccaaagtcgacagttacgctgaactccgtagaaggcattctgatcttgaatctgaaatgtcagcaaagcttgtagatgtaaggccaatatcatatttctattctaatatttgtctctctgttttcttttctccttattccttcttctatcaggttgagaaaaattatattgagtgctctagttcgttaaattggcataaggaaagattgagggagctcgaaacgaaaatcggttcattacaagaggtatgtatggcttgtaacacttatctcctcatatcttatcgtgttatgctctatgactctgagatttacttgtactcttcatatccaaaggacctcagctcttgcaaagatgcagcaacgaccactgaagagcaatacactgctgaacttttcactgtgagtttctcaaatcgtaatggtttcaaacattgaacttctttacatctttttagctgactggagagctaagtatgtcatttgaggcatttcacagtttcgaaatagatcttcataggtgttgtttttcgaatctaacccacaagctgtcatataggcgaacaagcttgttgatctgtacaaggaaagttccgaggaatggtctagaaaggctggtgaacttgagggtgttattaaggccttagaggtaagtttgccatcacaaatcagaagatagtgttctaacttttgtgttaccatgttaacctcttgagtttcaaatcatgactgcaggcacgcttgagccaagtcgagagtagttacaaggagagacttgataaagaagtgtctacaaaacagctgttagagaaggtactgagacccttaagtttatcgctttatcgattattattgcttagctctggtaacttgttttcagcatccttttcaacatatactgaaggtgttgcgtgtcgacccaattgctagtatgataccttgatattctttgattgttttctttaagttatgattttatcggctttcagatattttcagatactaggtttttttttttttttttttttttttgagaattctttctttgatttttgtgggaagtggtttcagtgcattttaccttctgggatacgcattttgaaatttattttctattgagatagttagtttttgcaacatcaggagaacggagaccttaaacaaaaacttgagaagtgtgaagcagaaattgagaaaactaggaaaacagatgagctaaatctgatacctttcagcaatttcacaaggtatgtcagctttctgagaacatgaaccatatttaatgcattttttattttattgtatactttcccctcggattgctacaattgcttatcaaaatgagaaaaaatgagttaaagtggggataagtaatattgcgtgcttcaagggatccacattacatataattctgttgtttggaacctacgttgattatctcataccaaaatgtaactcttttgacaattaaaaaatagcagtcactaattttttttaattccttgttgttgctagatattttacatacttttaagattttttaggggtgtacagtgaagtgatttggaagagtattttatttgtcgaagtagatttaacttgtactcaaatattgtaatatcttgattgtcctagtgtccatggatcagataaaattctcacatctttctactgacatacctttggtccagacgggttgacaattctgggaccagcaacatgatagaggaaagccaagcagttatttctaaggttcctgctggtgtgtcaggaactgcactagcagcttcactcttacgtgatggatggagtgtgagttttagtcttagtatacacttccagtttacagtgtttcaactctgtttgtggtgtatatatcactctttttatcttgcagctggccaaaatttatgagaagtatcaggaggctgttgatgccatgaggcatgagcaattaggtagaaaggaagctgagatgatacttcaacgggtatgatctatttaacttgttattaccaggtctttgtttaaaatttagatttccaatcttttccacttttgttttgtctatattctctatgtttcactagtgatttttcaactgcagttcactaatgacttgagaataatatttttcttctcctgttaacttactcttggtatcctgctttgtaggtgttatccgaattagaagagaaagccggatttatccaagaagaaagaggtatgatctacttctgtgcttctggagccatatgttttacgctcccaaagatttctttcactagtaatatatttgtatcttgttggagacacgcttaaatctgtttttgttcccaggggagtatgagagggtggttgaagcttattgtctagttaatcaaaaactccaggattctgtatctgaacaatcaaatatggagaagttcattatggagctaaaggtacctgatattgttatagtggttgttcaagatgcgttcttgtgctgttcttatacatttatcttattgataggctgacttgaggagacgggaacgtgaaaacacactattgcagaaagatatatctgacctacagaaacaggtaatttgatgatctattcttcgctgttcagtgttcaccatgtttgttgtggtcttcagtttcttgattaccttaacttgcaatgttaattgttgagactttgtctcactaatgtatgcctggttgttgcccaatcgattgatactgtgtttgtttctactatttaggttacgatactactgaaggaatgtcgtgacgtccaacttcgatgtggagctgccagggatgatgatgaagatgattatcctctgctctctgatgtggagatggaaatggaatctgaagctgataaaatcatttctgagcatcttgtaagtttgtttctttatctcgacgtcatgttttgtgttagattttattttgtaaaataaattgtggatgactaatgcttgtcctcatgttgggatgaatttcagctaaagttcaaagatataaatggactagttgagcagaatgttaagctgagaaaccttgttcgtagtctttcagagcagattgaaagtagggaaacagagctgaaggtatgaaggattttgcatgcatagtttctttggtagggtgtgaagttttaaaagaatttgtgtaacgtcaggaaacgtttgaggtagacctgaagaataagactgatgaagcttctgccaaggtagctaccgtgctaaaaagagctgaagagcagggacaaatgattgaatccctgcacacatctgtaagtatttccaccctccaaatcttttctctatcgcagcacttggtaaattgatgttgggtttcttttcaacggtttatttattttgtacatttttcgtccttttcaggttgcaatgtataagcggttatatgaagaggaacagaaacttcattcatctgattctcgttcttcagatttgtctccaggttctacttctatgcattattacgagtttactgcactatgtgttcttagataccctctattattgacctcatggctaagtttaattgaattaaatgatgtttcagttttatcttagaaccagttcttttcaaaattttaccccaaatgtcatcaaggtttagtgctgttctcaaattcaaacgaaatctatatttggaacagctaccaaagtttggtcttattttcgtatatctcaattgtcagtaatgaaaattaatgctgtacgcacaaattttgaagtgtattctggcttttcaagcataatccactttcctggaaatctcatcttgtttccttaaagtaaagaggtttgcaggctgttacatgctttgctcataaaattgaatcatagtctcagtggcactctagcttttcgaatgggtgacagagatgtattcttgtagctgtagtgccaggaaggaagaacttcttacatctgcttgaggattcagaggtatgacagattgctaaatcattctattctcttctttgttgtccacttttctagggtatcaaatttgttgtttggaactcaccttattggctgaattgcttgttccaggaagctactaaaagagcccaagaaaaagcttttgaacgcatccggattctcgaagaagattttgcgaaggctaggtatatttatcatcctcttgtcttttgtctttcatttcttactgggcaagtgattatttttgtgcaaaaagttttgtttgataaactagggtacctctgggtatgtaacacattttctagttggatagtcaagttgagagctaggacccagactatactagcgaaggaaataaagtgtggaaagcgtagtatctagtgtgaaacgtgtttgcagatgcaggtggattgctgaaaatactaatctgagcttatgtgtttgcaatcccagtgtcgatgtcctatagaagttataatcgtacgtcttgatacatagagaaacaacatgaaaaactggattgtatcttatgcagcatatccatgaaacgtaaactgtagttattgatttttgtcattgtttcctgtaaatttattttactgaacattataaactgcgttgttttcatctttcccctttggatttttaggagtgaagtaattgcaataaggtctgaacgggataagttggcgatggaggcaaattttgctagggaaaaattagagggcatcatgaaagaatctgaacgcaaggtgatttttatcacaaattcatatcatcagaagcttgtggtttcttcaaaattttcaccttatctctgtttatcttagagagaagaaatgaatagcgttttggcaagaaacatagagttctcacagctaatcattgaccaccagaggaaattgcgcgagagctccgagtctctgcacgcagcggaagagatctccagaaaattatctatggaggtagtataccatcacccgttaagtttatgattttttttgctttaatactaacagtcatctataggtctcagttctaaaacaagaaaaagagctgttatcaaatgctgaaaaaagagcgtctgatgaagtctctgctctatctcaaagagtttaccgtcttcaggttggaaacatgagaggagtgcaatttgatcttaagctgtgcgtactctttttttttttgctgacctgttgttctgcaggctaccttggatactgtacaaagtacagaggaagttcgtgaggtaagaaaacgacctttgatattagtttactaattctattctgcaataccgattaaaaatgttataactttatcaaaatactcaggaaacaagagctgccgagagaaggaaacaagaggagcatattaagcaacttcaggtctatataatatttgataagtctttcaaaattattatgtaagaagagtagaagttaaccgatgtgttggatgggttgtcacagagagaatgggctgaagccaaaaaagaattgcaagaagaaaggagcaatgcacgggattttacttcggaccggaatcaaactttgaacaatgctgtaatgcaggtagaagaaatgggaaaagaattggctaatgccttgaaggctgtctcagtggcagagtccagggcttctgtcgctgaggtactgtttcaagtctattttacctttcttaataacttagaccatgaatacatgaaccaattccatactgcatcgaggtggtgcgcatcaccagcatctttcagtgtttactctgtccgtctcctaggttgcataccctaattgctttcccaggtcgacattaaattcccattttctggtgctacttttgcgaagtgagtctttgcatgtggtttggcaattggttttacgacttgtgaataggcccaaaccaatttctggaaaatcactacatcgtcaatccactagatttttcagctgtttgccgtccattcacatattggcatatgatcatttttgcctgtttactattattgactattactttacatgtgtaaaattaggctagactttctgatttggagaagaagatacgatcttcagatcctaaggtaaatgttttgatttttctaatcattgaattgtggtgtttacttctaacagcaaagtcctggatggaatttgctattgcgagtttgtaacgattttcattttttcacttttagactcttgatatggatagtggtggaattgtctctctttcggataaggaggtcagtgaagtccttcatttttttttcccgcaattttaaattctgacatggggatttaagttccgtaattatggtattgtttgaaatttcctggttgcaatctatctgtaaaaggctgctcttgttattattctggatgttgtacataagattcaggcaggatttaggataggatctgcagtacgtattactgagttagttgaatttgatcatgtagagttaaggctttcgcataagctattgtttgagttaccttttacttgttgctatatggcaatccaatatttggttgtgtaaggtagtctgttaatctttttttttgctgtggtgattatttactctagatgtccatcgaactgcgtaccgcaaaggaagaaattgaaaaattgaggggagaagtagaatctagtaaaagccacatgctccaggtacttcctgaattggctaagttagtttcgatttcaacatgactattaattgaccttgtgaaccatcatgcagtacaagagtatagctcaggtgaatgaaactgcattaaagcagatggagtctgctcatgagaacttcagacttgaggtatttgtgattatgtttggatgaaacaatgatcacatctggatatgctgctatgtccactgtgatagaactagatctgctgttggtttatattttaaatctgatggctgtttgtaggctgaaaagagacaacgatcattggaagcagaacttgtttctcttagggagagggtgtcagaacttgaaaacgactgtattcagaaatccgagcaactagccactgctgctgcaggaaaagaagatgctcttctatcagcatcggctgaaattgcaagtctgagagaagaaaacttagttaaaaagtaaatgttctatcatgtaacagaagtatctttttttctttctcgtggacaaacacatgtttgtcccttaattgatattttgcaattgactgcaggtcccaaattgaagcaatgaatatccaaatgtccactttgaagaatgacctggagactgaacatgagaaatggcgtgttgctcagagaaattatgaaagacaggttggttaaagctctctatttcaagaaacattttgaccatcatgcatattcacgttgacgttggtttttattatatgatgctagaaactgactagattttattacccatcctgttgatccatttcatgaaactgttgttttctgaatactctattttactgcacctttgtcatatatccgaggatatcttcaaatattttctgaattgtgttttacattacattaaatcattgttaggtttttcataacttaaggtcttactgccatcagctaattctgttcttctctctttccatagatattacaactatcactctttttgtttcctacttctttttggagtgcaggttattctgctgtctgaaactattcaggagcttacgaaaacatcacaagccttagcagcccttcaagaggaggcatctgaactacgtaaattggctgatgcacggggaattgaaaatgtaacttctacttgtacacaactttttgtgattcaattcttcctacaattatagttgattcgtgaaacatcaatttctattttcttggtgtttatcagtctgagcttaatgccaagtggagtgaagagaaattgatgctagagcagcaaaagaatctggctgagaaaaagtatcatgaacttaatgaacaggtggccactgctctctgatctcttacgttgtagcttttatttgagcagccttattatttagtgtgttcaggatagtctttgacgatagtctttttccaattctttatgggtcaataatgcttaatcctccatgtgaatttgtgtagactttaattcatggtcatgttacaagtactcacgtatcttaattgatctctacatcagaacaaattactccatagcagacttgaagctaagcatcttaactcggctgagaagaacagccgttctggcacaatatcatctggaagcactgactcggatcaccttgaagattcgggtttgcaaagagtagttcattatctacgcagaaccaaggaaatagtaagagaacttcctttgcaggattgcttttcctttctttatgccccttctttgtactgtggggttatctaagtcatgtgcatcctttttgacaggctgaaacagagatctcactaatgagacaggagaaacttcggttgcagtcgcaagtgagttgttgtctcctctcttatgcctaatttgctacgacatcccttttaagcgacaacctttctcaatacacacatgcaaagcgaaaacctcctctattattcagagttgtggctgcggtatgatttttttttttgcaatttgtttgtctagcttgagagtgcattgaagatggcagaatctgcccggggttcacttactgctgagcgcgccagtacgagagcctcattattgaccgacgatggaatcaaatctcttcagcttcaggtaaagttgggtgattcgatatctgataacatatgaactaatgatctaattagtctttgtattggttgggttgaaacaattttcatttgctgactttaaattctccttgcaggttagtgagatgaacttgctccgtgaaagcaacatgcaactcagggaggaaaacaaacacaattttgagaagtgtcaggtttgtatggaacctttctttatgtctctcaaatgaccaaaccacattacaccacctgattttgttagctgtcttagagaaagctgataaaaaatttaaaacatcaggaaatgcgtgaggtagctcaaaaggctaggatggaatctgaaaatttcgaaaatctattaaagacaaagcaaacagagttggacttgtgtatgaaagagatggaaaagctaaggatggagacagatcttcacaaaaagagggttgatgaggtacgtcatatatgtatgggctcatacttacaattactttttgttactggttcatacttacaattacttgatgctttgtgaagttgcgggagacatacagaaacattgatattgctgactacaaccgcctcaaagatgaagtgcggcaattagaggtatgcttataaagataatatgacgttgtctaaatttctgcaatagtgggtgttttccaagggtgtgcatggatatgatatccctaccctttcactatatttgttgtcgtgaaattagttacaatgttaatggagatgataccatgtctgctgaaggtggttagttcttgctccttgatccctactggttaaagaacataaggtgctttatctatttgatattgggatggtcaatgaaccatgtgtgggatgccctttgagagagcctctttgtctcctagtttgggactactccctatcttgtaacctactctttaaatttcctccatctcgctggaacaccccaactatatgttgatttccacagttgcattattgatcattaatcgcatatagaattctagtgtacggtaattctcaattttgctgatgagaatttttggtgaagtcttagtgatatttgttaatattgtgtcattttggtttcgataatttgttgaatttgaattctgggcgtcccactggtctttagccctgcttttcctctaagttcttatatcaattgtgacgccatgatatggtttttaggagaaactgaaagcaaaagatgctcatgctgaagattgtaagaaagttctgttagagaagcagaataagatatctcttttggagaaggagctaactaactgcaaaaaagatctgagtgagagggagaagaggctagatgatgctcagcaagcacaggtagaatgagaattgagaactatctcgctgagttcattttagcttttacatgttgaagaagtactatcctatgtagatatattcatctgtctctgttacttattgtaggctactatgcagtcagagttcaataagcagaaacaagagttagagaagaacaagaaaattcactatactctgaatatgaccaaggttcgaattcattaatttttgtttaacgacttcttctagatgttttgcctttaacatagcgagttttattatgtcatgaagagaaaatacgaaaaagagaaggatgaattgagcaaacaaaaccagtcactcgctaaacagttggaagaagccaaagaagagggtaactattttatttttaatccggttggataaggttatgttggtatctatttgctcatgttttctattgctgccaaaagctggaaagagaacaacaacagatgctgtggtggagcagtccgttaaggagagagaggaaaaagaaaaaagaattcaggtattaaaaatctttttttaattgtggctctctcatttctgctttctgtgagtttcttaaacccatacgtgaaattttactgcagattttggataagtatgttcatcaactgaaagacgaggtaaggaaaaaaaccgaagatttgaagaaaaaggatgaggagttaactaaagagagatcagaacgcaagtctgttgagaaggaagttggagactccttgaccaaaattaaaaaggttcaaactttatactgcagaatctccactttgaaaaccttcaccctataccttgtatagtcatacgttccctatcatctgtttctcaggagaaaacaaaagtggacgaagagcttgctaagctcgagaggtatcagacagcattgacccatctctctgaagaactggaaaaattgaagcacgcggatggcaatctccctgaggtatcaagttttatatcatttggatgtaaatgtgtgttttctataattttatgattattttaccggtatgttctaaactctaaatgttttttgtagggtacttcagctgtccaggttctatctggaagcatactgaatgaccaagccgctgcttacgtgtcagctgtagagtactttgaacgtgtggctcgttctattgccagcaattctcaagtcagcactaagcctactgatatggtgactgaaccttcctctggcattcctgctggtaatctaaaaagcaaacccaaaaacctaccaaattgtgatttttttttaccccagtctaaagtgacaaattaatctttggcgcagctgagccttcaaccatgacgagagtcccttcttcaacacctttaataaaatctccggtggcaactacccagcagctacccaaagtagcgtcagacaacaaagagaagagattgatttcacagaaaccaagcactgagttccgtagaccaagtggtaggaggattgttcgtccccaacttgtcaaacctgaggaatctcccaaagttgatgttgatatgccagaagctgagggaactggtgatgaaggaaaacagcctgcagcccatgaaccagagagccaagtgactacatctgtacggcctgttcaaacacttgtccgtaaacgccaggctgattcgttggtttctgagccacaacaagatagtctgactcaaggggaaaccagttctgagattgcacctcctgcatcgaagaaggcaaaaggatctgagtctcatcctgatacttccgaaggtgaaaaccttgcaaaagagccagccatagacgaattgatggatgctacaactacaactgatggtgacaatgaagaaacagaagccgagaatgcagaggagaaaacagaggaatatgtggaagcacaacaagacaatgaagctgatgaaccagtggaagaaagtccaactgagacagaaaccattcctaccgaagaagagtctagggatcagaccgaagaagaaaaccaagagcctcttacagatatggaatccgataaggaagaaggagagctcgatctagatacacttgaagatctggaagagggtacagatgtagcaagcatgatgaggagcccagagaaagaagaagtgcaacctgagacgctagctacacccacacagtcaccttctaggatggagacagcaatggaggaagctgaaacaaccattgagacgccggttgaagatgataagaccgacgaaggaggtgatgcagctgaagaagccgctgatatacctaacaatgctaatgatcaacaagaagcaccagaaactgacatcaagccagagacctcagcagctacaacctcccctgtttctaccgctccaacaacttcctctactctagcttctgctattacttcaagcggagctccagaaacagaagatccaaaaagagcaccgtcaccaggtggtggaagttcaactattgtgacactagctgatagagcacagatgaaaagacgagaaagaatagccaatatagtagtaagtcgagctcctaatccagccaccagaggagctcgtggtcgaactgtaaaccttcgaggaggaggccgattgttgcctcgtggtggtcgagccccacgtggtggacgtggacaatccccgagcccaccatgatttttagtgggtatggttgaacaattagacttatccaaggaggctccttgaagagagaattaataacggtagagaaactcattttatgtctaaacctcttttctttttgtatcccggttttcttatatcactataaaatcaaacctatcatttttgccaatgattacaaattgcaaaacatatcataaacacaacacaaaaccaaaaaaaaaaagtgaagaaaaaacccaacattacaccatacaacgaaacaatagaagaagaagccatctcgcttgtaataaaatcaaagcaatccgaaacaatcggacggtttatattgatccttaaaaaaccaaaccaaaaacactacatgttcttctagttagctcactgtcccggttaactctgtgtttccctcttcgactgtattagacatctccattgttttaaaatcagcaaccaagtcttcttctttcttctgttatcatagacataagatcattctcgttagaatacaatacatagaacaaaaagagcatgattgagagatataaagaggagaatactaaggacctttaataccggagggaaccttagcttcttctgtaccataaccttctctctgttttcataaaaatcaaaatcatctaaaatagatgtcttagctgcgtagttcttaaagatgttcaacacttcattcccttgaggcaacctcacctatatatgaaggacaatgtttaaacagtatgagatgagattagctcttgataatgattcacttccttaagcctattaaggaactaatgttacctcttgtgtgtctctgctattggttacaggcttgttctcattgttctctagtatgatatgtcgtagttgcggatttggaacatctttgatgatgtgccacttcaccggaaaatagccagtccacttatcttgttgccagaactccatgcttttctcataatcaactcgtccaatcatctcagctacaccgcagaattggccacttgcattcacctgaatccaataaaatcgatcagagaccatgaagacgtcgcaaaactgaatacgtatatagcgaaaaatcctaatagcataccgagaagaacaggaaaaccgggcactttccacttttgtctgcagccttcttctgagattcttgatatgcactgtctaacttcttgttcccattgagagtactagaccagacattgtacttgatgctcttgtgtatgtcgtcttcgctatacgattttatcacaaaaaagattgcttcctcgtatttggtctgaaagctagggaggttatattgatcccttctgatcacagaaccaacaccgttgcttctttcattcccttcagcatccaacgaacatgactcacattctccattggtaatatgatcttgaccgtttgctaagtcattcatacttgtaccattttcttttgtcctcgctttcgccttctctgtttcatcccgatttaaagctccagactttttctttactgggtccatcgggtaagcaatgcgacctttttcttggttaagcagtgggggtggggcatagctgttctgtgatgcctatagcatcaatacaaagaaaaaaagatgagtcaaacctcttcaggtaatgtgaaagagagaagaattaaagagtgtaaatgttacttttcgcggtgttttaggacgatctcccatgccgtgacccgtgaaggagttcttgctctttgaataataattgttgtggttatgacttgaagaagatatgttctgtttcaagggtggggtatatgaagcaacaccatacacatacctgtctccaacagggtcccataaatatgtgggcgatgaaacatctgcataaccaaattggttctgataataaccctgagcagcatacatcggcgaatgaagtgcttgactcgatacaccaaccgggtttataggcatataagtttggcttgcatcataagactgaaaccctggcatcaagtagatcacagacccattttccccttgcattaccttaaaatcaagatcaagaaaatggtcagttaaaaagatcgagtcacccgagtgagtaattcattctcttcatgacaaggaagttttgattaccgggtactgaacttctgttccataaccatagtatccattatcctttgcttctccaactgaaccatcaagacctgtaaaaacacgctaattcagattatgatcatctaaaagcagaattgagtacatattatatagtatcagtgtgtaaaaagaagcaaaacctggatagtagtatccatagtagccaccataaggacaaggcaggccttgatatgtctcaagagtttcataatatgatggctctgcctctgactgattcttattctcttttgcagaaacctttaatgttgcaaaacaaaaggaacacaaaaacacataactgataaatcatcctaagaaccaaaacatatgaatcatctgtaataaacagagaagagagaatctttattaccatggaagtggtggaggcagtgaccttagcaagaggatccactttaagattcttcaccatatcttcaaaggctgaaacaaattaaacaaacgttcccgaagagatcagattctgaaaaacacaaagaaacaagacatatgtatgtataaagtagacacaaacattactagtaatctttttgatgcctttattttcttaactatgtgaagagacaggtttgaaacgtgaactgatgtctgaatatttagtcgtaccgataaaaactaataactaggcgtgacttatatatttatagttaatattgaaaataagacatatgagtctaatcacaagaaacagagcactatacacatagacacacatatatatatttacagacacacaaacacaggattcagataaaaggtcaaacgcaaaagttaaaaagacgtgtaagaacaacacagattaaacacgtgtgtgtaggaaagaaagagagaaagagtacatttacgaggatgttttggaacatgagaagtcatctacgaagagtagtaaaagaaatttatgtgtttgactaagaataaaagacgaaaaaatcaaaacacagatgaagaaaccaaaactcgaatcatctgtttcgcagagggttttaaaaagtctcaagaattattaaattagaaagaaaaaaagctgtagaaaatctgtttatcaagaagaagacaacatcagctaaagatatgttttatttttatgtttgaaaactaagtacagatacgcaacaaagaaaaacagagagagggagaagaaatggtaatggcttacgacgaagaagaagaagaaagaagaacagagagttttttttctattttttcttttgcaatccttcttatttattttcgatgtaaattaaaaaatagaggttgggaagaggtacagatggagggaagagaatggtccacgtcataaggattcttgatatgaacgaagatcgaccgttggattagacgacaaggcaaaaacttaaaacatcttttcttgccaacttttccatctggaatctattcttaacacaactctcttgtaagtgcttcttcaaaaagtgattttaaaaaagagaatcttaatttggcattaactaacacaattaattctataaaaaaaaatcataggaatacatattctatggaaacaaaaaaaatgaaagttaggaccagttcttatggtcgggcaaactataaaaagcacagaagaatatcatataagatagttgaaaaattggatttgactctgcctctctctccatgtatccttgagtccgagcaataccacacaataaaaataaaaactatattttccattaaaaatgatttattattcgatgagttttacaactttttaaaaagttttctcaaccatataaatcattaattaattcttgtctaacaaaattttaaatattctttgatgaaaagagatgaacaattcctatacgctacagttgttgttggattttattttttaaatgttattgaagattgtagattgagatctcatactactattgatatgcttccattattgcaatctgagttttctttgaaaatttgtatcattaggtgtcaagtggcccattcatttgtgtacacttacatatgcatctatatttcttatgtccccccaccaaaatccagatctaaactcatatgaaagtcatccataagttttaactatcctagaaaatgatcactcctagaatttaatttctctctattagattgggactactaataaacacacaatcaccttacataattttcttcaaaaatgaaagtgttgtgtttttgctccatttgtattatatccaaagtagatattgcttagggatcaagttataattgtcaacaccacataaaaagccaaataggccaaaaaaaaataagaaacaccatatggaactatttaatacaataagccaaaattatggagcttaagagaattacaaggtgccacgttttgtcattgccgtggcctaaacgtgtctgcttcacatctatatgattttctttcttttgttttcttttccgtcttttatttttttttttgtattaaaatttctgttgttatatgtgattacgtatgtctaattaagtttataagattgcatcttacaattattaaaccaaatcttatataattgtagagaattaatcttacttcaatttgttgactttgcttcgataataacttcggtgctcatctcataatttctaaaatgtgtatgcaatagtataaaaagaaaataaatatggggacaatcttgtaattattgaaagctattgtagtcaattagaatatcattaatattgaggcgtcagatgctaaaattgaacgtatataggcgccaatgggcctatttacctcttttaataaaagcccatttaactctcaaattgtcatcttcttcttacttgtgcttacaagaacaaaacataacaaaacactttggtaaccaaaatcttacaaagagtatcaaatgttgttactaaacagagtgattctacatatcaaaatcaaagcatctcaatatcacatcggtcgtgtcaggtttcgatttcacaggaacttggattcaaagcttatcgagtattgctttgagatgtggttgaagagggttagtggttgtactcatacgaaccacatacgatagttttccatcaaccaattcaaattctctacttatctccttcacctgttggagaaaaaaaaccccataaatcaccaattagaaacacaaaaatgttgtgtgtagagacagagacattgaataaataataacaaagagaattaatctgaaacctttgaagcgtttcccacaagatcacttttgagtttgattgattgttcatctacattgtatgttcctttctgtgatcagagattcagcaaaacataagtaatgattttggaagcttatggtaaacacggatctaatggaaatttggattatgttaacctggacttcgacgagacctgtgctctgagcaatgacgacttcaatagaaccatctggtcttggacgaaagtaaccactctcggcgtgcatcggagctcctgattccaatttccatgtcttttgcgtatacgctatcaccggctacacaaagtgacagagtaagcgtatcgcgattttggtatgcagattggattaaggttaaaaatgaatcggagatctgatatggttaccttgccggaatgtgagaaacggatctcttcgccgtagcggaaagacggtatagtaggatattcaccttctccttgtcctctccatgttcctaatagatacgacaacggcgctacaaaagggtgcaccggcggcgattcccctgggttttggagttgctgcagctgattcatcgccggtattagcaattttctctggacagatgatacatacatacatacacgtgataattggtaaatatgctaaagcaggctacaggcccaataatagtaggctatgttctgggccattgggcctacattatattataaaaaaaaaacataaatcgatgtatgttcaattaatggtcgatctctaacaaatttaaaagttgaacttaacataaagtggattcgttgaaaaacagtaaatatattgtggactcaaaataaaaacagatagaggttttctaagattagtattttatgggtaattatgtttatgttctactatctaaacgatactgtattatgttgtgaaaatatatatttttattcaaggtttctatttatgaaagcattgatattataccaattgatatagtttttggaagatgtattgatagtcaattatttttgtcgggtgaagaaaaatatacatagaaagaaaagagataattaaggggacatcacaattttctttgtcttgaatgaaattcagaccatttcctccctccacttctccactttctttggaactcataagatactttttctccatccatttcttttcctctcttttcttaattaatcactgtccttttgtctctattttccacctgctttcttcatttcaagacaaactcctatgttcaccaaaaaaacaaaatattgaacaaaaaaaagaaacacacacattaatataaaaaaaactaatcaataagctatagaagattgttttctcttcttgctcaaaatcctttatggcatccgaaaacttcagacgtggaaggtaaaaatgctgcaatcttttgctccatatcttttaatttttctctgccaaaaaacagtaaatatacatgcgtacgtacctcgacgtgcagaccaatccttttgctagattctattcacaagacatgaggaagggctttaacattcgtgacaccaagtaatgtcctcatatggatgataaatgaactcaacccatattgacccttttttcacataaaaataaagctttaatctttctacattgaaacaggtttctctgatttgggagactcgctggcgatgttaacgaagcccggaaagaagcttgactcttcagaggtatacgaggatactcttgataatgaatatggagtttgcatgtctacttgtagtttgatatctttttttttttcgttattattgtgcagtcaactcatcatactacgagttcaaactatccaccattagatattgttcatcaaactccacaaccacgcaaagagatgcaacaaaagccattgttcgatcccaagaagatggataatcttataaaaccggagccagctgggttcaccaatcaccaccgtccaaaccctagtccaaaaatcccatcctcacctggttccaacatgaccgagtcacaatcaaacttaaacaccaaaccaaacaacaacaacagtaacaacaatagcaatatgagctcaagaagcaacagcattgagagcacgtcctctaatccctctaagccacacacaggtggtgacattaggtgggatgctgtgaacacgttgacctccaaaggagtccagctcggtatcagcgatttccggcttcttaaacggctcggttatggagacattgggagtgtttacctagtcgagctcagaggaaccatcacctatttcgccatgaaagtgatggacaaggcttccttagctagcaggaacaagcttttgcgagctcaaacagagagagagatcttgtctcagcttgatcacccgttcttgcccactctatactcacactttgaaacagataagttttattgcttggtcatggagttttgtggcggtggtaatctctattccttgcgacagaagcaaccaaacaagtgtttcacagaagacgcggcaaggttagggaaatcaaatttactgcactaagtaacacaatagacaattatatttgtagaattcaactgacaatttttttttcatttgttcttacagattctttgcttctgaagtgctattggcattggagtacttgcacatgctaggaattgtataccgtgacttgaagccagaaaatgttctagtcagagatgacggacacattatgctctccgatttcgatttatccctccgatgctccgtcagtccaactctcgtcaaatcatcctctgttcatgcggccggcggcggaagcggaagtagtcgacctgtaggtctcatcgacgaggacgcggcggtgcaaggttgtatccaaccgtccacattcttcccacgcatcttgcagtcatccaagaagaatcgaaaggcgaaatcagatttcggactcttcgtcaacggatccatgccggaactcatggcagagccaacgaacgttaagtcaatgtcattcgttggaacacacgagtatttagcaccggagattatccgtggagaaggacatggaagcgccgtagattggtggacattcggaattttcatttacgagcttctctatggagcgacgccgtttaaaggacaaggaaaccgtgcaacgcttcacaacgtgataggacaagctttaagattccctgaggttcctcatgtgagctcggcggcgagagatctcatcaaaggattattagttaaagagccgcaaaaacgaatcgcttacaaacgtggagcgacggagattaagcagcatccgtttttcgaaggtgtgaattgggcgctaattcggagtgcaacgccgccgcatgtaccggaaccggtggatttttcgtgttacgcaagcaaggataaagagtctatggcggctgttgacggtggcggaaagaagaacaataacggtgctggaggtggttgcagtaccggcggtggtgataacaaacctaacggcgattgcaatgatcctgattacattgactttgaatacttttagcaactgactatataaatgactaaaattcttcaaacaatttatgtataccctttttgttgttgtctttacatttctagagaattttatttgatcataactggttttattcgaccttttaattagagctcgatatgaagtgtataattttgagggaattttttttttataaatcatgatttcatttccactatttgtaaaaaaaaaaaaatctataaagtaaaagtatcaatttaaatttcgagtcgaagaggatatttgactaatcctaacaattgttaaaaatggcgtcatcagtttgtttctgaaaatcgcattgttagagattttgtttatgtggaatagaaaatggaatgttgatagcaattcaatggtagcataaatatcggattggaaattttagtaagttttctgcgagaattgatggaaagatttgaggaaagtgttgttgaatgctaaatcttttatttgatatatatttttttaaaaataaaaaatactgataatggcatagcattgatagcaaaaaaaaaggaaattagtgaaataattcaggcgcctaggcccaaacattttgatatatctagttgggccggacatgatagcaaattggaatctttaaatagcaaaaaggaaatgcgtgttggaaaaaagggaaagacagcagtcagcagtcaacgaacgccagctggaaaaaatcaaagcgttttgactaccgactttataatttaatcttcaccgttgaaatttacatgatcaaatctcaaccgtcaattgctttcatacctcatctataaataatgctctcctctttctccatctttacctttcaaccacacatcttcttcctttcctgaataagttttctctacgcgttcgctggtgatattcttctaaacgcgtctctgatttgtttgaatcgatcatcgttccttcttctggattttccatcgatatttgatttttctagggtttgtttctaaattgcatcgatggctttttatgttcatgcgatttacttttccctctgttattctagattgttgttcgatgatttgatcgttcagggatggatttgatggatcttatgttttcacggggcttctctatgctgctacgtcttcagggggtgttcttcttccttacgcgtctctgatttttgttttcttctctacgtttcttattcgtctcgtctcgcagtttttttggaagctaattatgatccgatcatcgctttcgattctgttgttgtagagtgtggatgaggctattatctatcggtgattgtttttttctggatttttgtcacgcgttttctctaggatacgtcttcaagcgaattctgatccgatcttcgtcctcgcttctgagttttctcttctcactgattaattgattttctaggttttggtttataaactgcatcaagtggtctttctaattcatgttatttgctcctcgttttattgttgatttagattgtggaggatgctatgattgatcggtgatggctttgattgatccttgtcacgcggtttcttaggatcttttgtcccttctattccaaatttttaattcctatgccgtttttttcttctatataagcggtaaatatcatctctattggttgcagatcgtcgaggcaccggaattgctccgataaatctctcattcttctctgtcatcgatttaggtttcgtctgatttctcttgttacatctgttttatctaaccacaattacctctgttctatttcgtctctgctaattgaaggatgtggttgatctgtcgtcgctcccttttactttctggcggtttcttctttccctttgcttcctttttggagttcttagattacctgatttcttttcttttctgaatttctggagaaatttctacgtgttagattgtgtagatgttgaaggcattgttggagggaggatggtttacgtatgagttggtgtttttggtttcttctcttctatacaacttttggtctaattattgttttatttaatattggctaatgttggtgaggtatgatttcgttctctgtgtcttgttgtgttttccagattctcttcatcaatcaattcagtctgtttctcttctgtgtacacattcagatgaaagatgaacatatattccttgcagacgagttttttcctatctcttgtcctttttataagtagttattctattgaagtcttcaagtttctcagtaatgctatgtcttagctcctctcatgtggtttattcaggttttgttcctctttgcctccgggatctgttgcaatctatttgttctaacatacgccctggttaactggtctattcctctttctctctatttatagtgtttgatcctactctcttatgcttgtgacggtgtttttttttatgttaagtgtcccattcttttaggttttttgaagatgcaaagaaggctagttctgtctcagtgtattctgaaagatatctttgatctgtcgtggttcctgttacctttctggcggtgtcttatctccctttgttttctttttaaggtttttaatttccctattacctgatgtttttgtcgttttaaatcgtagaggtcaaggcattgttggagggaaggatggtatgagtttaattttgtgtttctggttacttctcatctacacacttttttccccctaattgttttatctaatattggctattattgtcagtgaggtatgatttgtcctctgtgtcttatgtttcccagaattttcttcaccaatcacttcactacgtttctctgctgtgtacacacttgaaagatgatcatatattccttccaaacgagtttgttcttataccttgtccttttaagtagtttttgtactgagcattttcaaatatcttaggatatctatctctgagctcctctgatggagaaggcttggcctgaggtctggactgtaccatcagggagttctcaacatgacttgatttttgatttttcaggttaaaggtagattttcgtagcgatgttggcatttctgttttaagcctaaggccctgtcttttgttatagatattcaagcttataaaagggaaaaggttcaggtttactaaatggattctttcccctttatctctgttggtgttatctctcatgctacatctatattagtgatggcttgtttttatgtatgtcaagtgctccgctcccctatataggtatgttgaggatgcaaaggtggcaagttctactttgatctatttttctcgaaattttcatctacagtcctcttttcattggagatgtctctatttctggttctatgctctgcattttcctatggtttaaatgctaatcacttcggctcgagatctactctttctacatgaattcattatcttcatataggaatttggatgatgctaggacgattctgtttcgacctgttcgcctagatttattggcaacgagggatggatgtaatcagcttttcttcccttatctgttttccctttctggttatgtaatctgcatcttctctatggtaatctcttctgcttcagatgaaatcattatcttcacataggagtttgtcttcacataggagtttggatgttgcagtggaagttctgtttcggcctgcttgcctacatcgccctatatctgttacatcatgagtttatgaggtggcttatttctattgatatctatagtgttgattgccgaggaaggaaaaacaagtttcaaccgtggaccgtggttgtctcaacagggatgaacttggaggttccatctctggttggattcaggtgttttgagctaatcttcttctgggtttacttctctaccatactttctaccgatttgaagatttgtcttctgtacctttgatgatgattctcagttttgcagcaatgactcagtttttcgccttctagtcattaaactactttcccacaatgagatacttagtgtttttgtaggttctttcacacttgttagcaagggtatatgtatgttgccgttctcagaatttggtaggtatgaatcacagatgtcattgtttattattgataacataagtgattcttgctggtagtgtgacctcttgagggcaggctcatagaagatgaagagcctcttggttttgatgataatgctccctacttctgagttctgaggtttctttattcctgggttgtagctggtttaatggttctgtagacatttgataatgaagtctctcacttcattttgtttgggtgatgtaaaatgttgtcagtggattttaggtgaggcttaatctcatggattattcttttgaaatcccctcaggtgaatcagtgaaaattgagaaagtgatgttcaacttcttatctcttaatccttcatttgctctgtcacacattgaagcctattttcggttgcagtttgttaagttttcatgggaagcgttgtctttggagtgttctgaagttgactttaatcctgaaagaagaaggatatgcttttactgaagttatcatgggaagcactttttgtggagtttacaggagtgtctatgccgttgcagtattcgaggatcgctttgatctgccagtcgttccttgttacctttttcgcttttgcagttctttcttacttgccttgcttttctctcgttcatgtattacttgatgcaagtcttgaaactttcccgatattggaccaaactctttttcattcatgccttttaggactactaagtatgaactcctctgatgtagaaggttcgatatgtgctaatcagtctactggtaatcctagtaacgctggacttctatctatgctaaatattgtcttggtgttatagaaaaccataaggtggctatttgcaatttcagggccacaacttgtgcagattccaggcctttatcttgtgttggtgattaatgttactcatattatacctacggaagggagttcactgcagtaagcaacacaaaagagagctttagtgatgcaaattacatgatttcttgtttgaagttatgttgagtacattctacaagaagatacaatgtcgtggatgatccataattggatccaattatctcgtggagcaaaagccacaatagcttcatcgttggaatctggaagcgcttcaccgagaagttctgccgaaatcgatagaatttggcagacattacttggagtttatgaccgaactcaacttacatgtaagttttattgtatgtatatatatacatacaaagattatatctccgagtttggaatcgtctctcatcttgtttttgttgttgacgactgggctttagaagaattaaggagtcagagcaatgagaatgtggacatgagtattttgtgagaggccaacctgagcttttggtgaagatgatgttcaaaactgggatgaagaggtttgaggaacttgcagtcaaacgccgagcaaagaaaaagaaagctaaagctgaagcggaagtaaaggatcgcttgcaacacttgagaatctgatcaataaatcttttcgatttaatgaattaaataagctcttgtattgtttgtatcaataacaatttagtgtggcaataaaattgatgggttttattttgaatctgtagttttccttccttcctcttacctcttccgattgattgacaagggttgtaattctactcgatgataacctgttgagtatgcttggcattaatgttatactatttgtgctgtcgtgttctcatagatgatggtccattttccgaaagagaaaaccataaggttatactatttgtgattttgggggcaggtaaatgatggtgtgctactacttatgcatatttcagacctttatcctatcttgtgtattggtgtttgctcatattcctcctaatgaaggagattttgctatatgtttggtagagagtgtcttgtgctataatatgcaaatggtgaaactgtcgtcatatcccttaacttacgtttcttccactgatcaacctgtgctcgcaggaacttgaggattttcttgaataggacatagttaagagttttatgattttgtccacgcatccgtgtttctgattttaagatatctcagccagctttaacaacatctcagatatccttccaaaaggctgtgaaaaaaaattaacgaccacggtgggactcgaacccacaatctcccgctccggaggcgagcgccttatccattaggccacgcggtcgtttttaatatgcttctattgatttaatatatatacaataatttatagtgtaatgaaacgagtttatgtctctctcgcgtaaccttttgcttcgcttcactcgtaatgacatcaatatctgaacgttaaccatctgctaaagaaaaagtgtttattattattgtttcaggatctctgtttaagaatcgttgagaaatttcctggttcttgattttattagaaagaaaacacagaaaacaaccttttgttatctgagaagatgaatccagaaacgaaaaggaaaagttccaagttctatagatacagtcctcttcggcttgagggttgaggcaaatttaaagccaggattatgattaacttcaaacaaatccctcaacttaaacatgataattatttccgtctgtggcttgtaatcttgtcgctagcctttacggtggagactttcatgaagaagattcaacactctctatgggcaagtctggttgtgtcgcccattcagtccacgacccatcatagatcggcacgtcggttttccccagccggtgaagcccctaacagagcaagtcactaagtcagtctctctccgtttatatataatctcaaataaaataaatggagttaccattgccaagatgcaagctgttacaccagtcccacacgaggccataataggcttgtccagtgagatatctgcaccaaaaagccttgagatcttacaaatgttttatataaataagattgtgaaacttattcttcgagatgaaatagtttaccttcttggtcaaatcgtttcttcagctcctctgctggtaacaatgtgttacaagaatcaaacatctgcagaaagaaggaatttatcacattaactctggggactagatgcagaggaagtgtgggaaggaagcaaattctcttagggtggcttttacctgaggaaaagggatacatttgcttccaggtatatgaccgcttcttattcccttacggggttctggagcagtaccatcaaacctgtgaaaaaccccgtaaaataatcaaaatgctacactgagtatcaaattagtgtgaaggagcctagagaaaaatccattagtcaaaacaagtaataactcggcatttatagtacctggctttggaacgagcgtctatgtgttgataagtcggatcctccatattgttcttgacctgtgaattcaccaaagagagtcatgacctaaaataagagtctgaacaagttattgtaacacaagcgcaaactcaaaatcaggcatctacagacatcaatctaccaacatactgagctatagtaaaattgatatatcacaatcacaattctgaaaaacgggtataaatatagaccaaattaaagattcttaagcagagaatgatagttaacaataatgtgaagacaaaaccattcaggaaatgccaacctgatcaagtgtccacactagatgtggctggaacttagtctgaaaggttatcggactgacctgtgcaaccacgagagagaaaatttatatgaagaaaaaacacatctttactgctcaaaactcatcatgaatctacagaaatacgaaccagagaactattatccaaattagtgacttacggtttgtccttgataaattttctctatagcctcacttgcggcactggctttcagaatagcatcacctgatgcactagattcaacatcataacctgatgcacgccatcttggtagacctccatcgagcacccaaactttttcatgtccaaaaactcggaacatcctatttaaggggaaaataaagaagcacatatcaattataacaatactcgaaaaaagactcaggacaaagtaaaaggattaaaagaacaaacaagaaccagaactcaccaccatacacgggctgcactaaagatcccctttccatcatagacaaccacttcatctttgttatcaattccaagagcagaacaaccagcagcaaaagcttcctcagtgggcaacatatgtggcaactgttacaagtagttaatatatcatacaatactttagatgattcccttaagatcggggcaaagagatgtcttaatgaaaacacataataacatatactaacattaaagagtccagacttattactttatctcacataagaaaaagctacatactatcttaaaaatggcagcaaaagaagataatatctatcgataaggtttcatttatgcataaaagcgatatcaatgtgaagtgaaaacttcaaagtaaactgcaggggtacatcttctgtaaaagaaaagatggcgatacttacactagtttttcgatctgatattccatccaaatcaaagaagagagcgcggggaatatgagcaacctatataggagaggacacagtttatgtccgacagtatcatcaaatagtgtactaagtgtggtttcgctcatccagaatgaatacaacctgaacaattgtgaaaacaaagaagttctcaaaattctatctgttcatactctcacctgatattcttggatcggatttctctgctcatccggcatataccatgaagcatccaaaatctgaacagcatacaaacaggtaagtttaagtttggcagacatattctccaagaagtgaactaggagaaagggcagtcaccttcaaatcaggctctctaagattagcatgaagccaatcaacagaaacaacaggttcactggttgatacggatgatgtggagtaaccggcttttgtctcaactccagtagaagccatagctcgacgagcccaagtagttgatttataggctgtagaagcggagcctaactgagagtggagtgacctcttcagcaattaccaacacaagaagaggaagaccaaccaaaaagtcagaatcatatacagagaggcgaaactgagcaattcacataaaacttcactacctaatttatgattacaaaactcataagtccaatttcaaactttgataagaaaagcatcgattgacatagacctcatcaacaattaagcaattctctatagtctattcaacatttcaaaagctcgaaaacccagtagaaccactgtcaaatcatagaaacaatccaaacgctcgaaatcaatccagacactctcaaacccagaagctaacgagtggtcaaacgaatggctaattgagaacagatcgcgaatcagatatcgacttacactgagaaaggtggctggattaaagatcttttgcggaagagaaggagtaatcagtcggtgactagcagccaagaaagttctggagaaaagggtcgaggccatatccacctcaaatattctctcgataaaatgcaacagagatgatgggttgagttagaaagacgccaaaactatttgctgtcagattgattctcttcaagtactaaacccaaaaaggttgcaactttgcaaacgtttttatcaataaagaggattttgtcactgccgccacgaacgggtctggaagagagacacgtctagggcgtctttggcgtttcgtttcaccaaacgtgcttcttcgcgttttgtgttttgatatttttctattccggtttaactaatctgatctaaaccaaaacatgaaccgattcaaaagtatccattgataaagctggaaaattctacacaatgttacatctttaatgaacatatccaaagaaacaaaagatgaaaaagagattcaaaaggggaatcctttacggatgtatttcttggatttctcagctaaacgtttcatgtttttggatttctcgtaaaactccatcagctcggttgcaatatcttgtggatgacacattacataaaccttcaagaaccgtttctcgctcatccttaccgctctgaaaatgctcacttcttttatcaatggctttagacgcatttccaagactctcttaacgagatccgcacgaggttttagacgagactcgaggttgaggagaagcaaacaagggtgcttaaccacggaatgagctggaagtttcatcgaggctatgacgaaagtcatgtttctctgaactttctcaacagagagagagagaaggattgggcattttccatacaggtgccaaatctcttcttccgagaacccaaacttttccaagtttctaactttctcttcgattgtctccatcctcgagaccccgatgatgactgcaacatatttaaacatcttggattctctggtgactccagttttctcaatgtattcaaacttctcattgttaaagtttgttcttggaatcaacgtgggtcgcgatatcaacattgcgacaagatcctgttggctaaagcccaaccctttgtagtattctatcgcgggtttgatcttgtcatcgaggtcatacaacatgagtgacggattccggataatgactctgcgcaacacctcttttgaccccaaaatctccatgaagtagttgatcctttcatcaaggacaagacggcaactaaagaacctaggacgacagttaagaatcttcacaaggtctgaagacgtgattcccagtggcttaagaaggcttaacttaaactctaactgagcaacattggctctctgcaaagcaggcctacgagtaaaaagcttggatatttcatcatcatcacaaccccatcttcgtaaaacttgtaaaggactactagtaatatctctcactttctctttttcaccaacttctccaacataatcaaatttttttctcctagacgatagatcagaatcctcaatgcattcttcagattcattcaggcataacgtcgaacacctggtggtaaaggtagcagaaatgagatttctacaaccagcctttctgaccaagctcgaactagtaaacaataatctgataacagctaagaaatttctcttcccggtcgaatgcatttcaagggcgtaatcgagagtttaacaaactggagaaataaaggagcaaattttctctaagaatcaacaatggctctgcctcaacgacacaatcagcgacatttacacgcgtatttcagatgcttcttccatccaattttccgaaatagctagaaaaaatggaacaattaccagtacacgaagcttgtgatgaacgagcgaagaaacaaactccgaccaacggaggagagtttgtcagagaagaaggaggcgatggagagagacacagccaattcggaccaggtttgagtccgagtcgggcgtggaagcgagagagagtaggggactaggggtagtaaataaataatgtggttcaaactgaaaagagatataaaatattggactattatgtaagatacagtaactgtgaagttgttaaaacgccgccgttttggtttttttgtttctctcgttttctggcgtcagactctcaccctttgtgcaagaaaccttgagagcttaaaaattcttcacttgggtctcttctctctctcttctcttgcgaccattccgttcgatccatatatcaaaggtatgttgctttgattgaatgggtttcttttgttgaatttaaattgataactttaaatatattgaatttggggtttaagaaaagttttcaattttcgtctctgagtttgagctaagagctgatctttgagtttgagtttgtgtttgatttgattcactcacaattcttaattagggttggtatatcttgtctttttcatcgttttccttacacattgcccatggcgatgagactcttccgggtttttaagctttgtcagatttgaacgcttcagtctacttacttgctcagacgtggtttcttttcatttaagtttgaacattgttgatgaagaacagatttagcttccacgtttctaaatttccagagatgacactatttcgcattttttgcagcttgatttagttggttttcaatgggggacagtcagtactcgttttctctcaccaccttcaggtattaactttgtttatcatatcaatgttatctctttctgagcatttggaacggtttcttcggggtttgattcatgttgtggtttatgaaacagcccatcagggaagctggttcagatagaacatgccctaacagctgttggatcaggccaaacatcacttggaattaaaggttttttcaatgatctaatcaaattcgagaggagatttttaaggaacattgtctttggtaatcatgactgttgttttctttatgcagcttcaaatggagttgtcattgcaactgaaaagaaacttccttctatattggttgatgaagcgtctgtaagtttgatcaactctttatagcaattagttctttttcattctgtgcctgctcgtgttactttcctttcggttgcatagtttcagtaactcctacgaaactaatgtttatctattgtctgtttcaggttcaaaagattcaacatttgactcccaacattggaactgtttacaggttcttctcttcagctatccatacttcttttttaatagcgaatttggttttatagcttgcaaattggatttatcatacattttttattttgttttgggtacttagtctctctcatcaggtgctagtgctactgatggaacctttcccttagtaccctaatgatttcagtgctaactttggtattgccttttatgtagtggtatgggtcctgatttccgagttcttgtgcgaaagagtaggaagcaggctgagcaatatctccgtctgtacaaggtaatctttaatatcttctgtttttttgtcttcttttcctggagtgtctagtagtacatgtatgataaaaactttggattgatgattccagttgatataagttcttgcttattcataaatccagatcgctctgttgattcaacttctaagggcgtttattgttgcaggaacccatccccgttactcaacttgtaagggaaactgccacggtgatgcaagagttcactcaatcggggtaagtactatatcgagtgttatgtaattacttcctctcatatgctcaacagggttcaaaagtgttattggctcagagattgcaactctagagcgagtctctctatgcactttttagctcagttttgatattgatttggcgtgagataatgttgttaatgcaaatctgtatttgcaaactagactactgaatcttgcttctaatctctgtctccttctgctgttaatagtggtgttaggccgtttggagtttctctactggtggctgggtatgatgacaagggtccacaactgtatcaagtaagtagaactttaaagaaaatataaccatcctgctcaaagtgaagtaaaacccgtaaactgaaaacatcttatttcataattttcattggccactaggtggatccatctggctcttatttctcatggaaagcttctgcaatgggaaagaatgtttcgaatgcaaagacgtttcttgagaagaggtgataataatttaccatttgtggtgatgagtttatgatcttggaagcatgtcatttcatcttagtctttgatcaggtacacagaagatatggaacttgatgatgccattcacacggcaatattgacattgaaggaagggtgagcatttttaccaaaacttaatttactttatttccagagttcagaatttctcaaaagcctataacctccgtgtcttttcacagtttcgagggagaaatctcaagcaaaaacatcgagattggcaaaatcggtactgacaaagttttcaggtaaacattcaagactacaaaactaatataaacaaaaaatcttgttattcccatcaatatctgaaaagtgaatgttatatgcagggtgctaacaccagcagaaatcgatgattacttggctgaagtcgagtaaaactttcacttaaccgtgcaaccaacctgatttgaatctcagtatactctcagagttgatggttcttgcttttgtaaaacttttggaatttgttaaggagactcgtgacccaataatttagaatatgttttttcactcatttaaacgtctgttgtgaaaattcagtttcatataaccaagtttcatgcacacaaattacttagccaaagctacatatacgctgtgttgtaaatgccagtaggaacttacatactgtacaagaccaactttcaatcaaaacggtctatttctcccttaaccggatatcaaattctcaatgttacataaggattcatcagatagttcttcggcaactttggttaagaccttggatatgtaaagtttgtcttactctgaaaaccgactacatatctctccacgacaatctatctaactagttcagcaacaagaagttctaagtagagaaactacatagaaatatatctctgatgcaatcaaccttcacgtgtacaagaagcaagaagagaggtaaccggcgaaccacagaagaggaaggtattgcttttgctttttttcacctacgcttgatcatccagtcgtgagctgttcgtggggcagtggagattccctcgtagtatcgagactcgagttttcctctgttccatctcttgacaaatcgtgagaacagtcctcgtgcagcttcggtcgtgagatcattaaagtaagtacgtttttcttctttcagccatgtagcaaactcgttgtttttcgagaagtagtcttccattgatagctctggaattccctctttctggaagaaaaaacggaaaagaaaagcattttaatcagaacctcagtgtggatgacaatccgtcaaacattacaatagggcaacaagacttttgtaattaaaccatgactaaacaactgaagagaccagcgaagaaccacacatacaaagtctccaaagcaatatacttttgactttttaagtgaatatacaaatagatgtttttatgggtaactatttcaaagggtaagttagagctcactagcttgtggtcgctttccgtatgtttctttttcggcttatcatccttggacttctttgctgtaagagaaaaaaaaatgtcagcagcaagaaaaacagatcatactgaaaagcaaagacacatgatataagtcatgctgatgaaagataaacatagctgctttagctgtaaccaaaacaagatatttcttgctgcctataatccctcaaaccaacaggttccgactacaacctcttccttctctaggagaatataggtaagacaaagctaaattgatgctccgttaatggcatacaagaacaagaaaactccagctcacatgggtataactataaacacaccactctctagatgaagaagcaaacacatcaaatttatcatacgacaaacttaacttgactcaacatataatcaaggttctaaaacggatggaacaatatttactaactcaaaacatgagaaacagtatcttacatgtactggatttgtggtgcttgtgagatttcttatccttcttatcacttctcctacttctcctttcatcatctttctctgttcctcgatgcctcttaactttctcttcgtctgtcaattcataaatcactatgtatcagattatgtcattcacaacaataagtcacactctcaacgccaactacaaaatctaatcgaaaacacagatagataaattgatggcatttctcgggaatcggaagaaaaagtatatacatagaggagaagaagaagaagaacatacaatcggaagatgaagaatcttcgctccgagctctgcttctcttcttctccttggagctccgttcgcttaccattatttcccgacggactaaaataaaagaacggaggagctgacatatatttatttggaccccgcggcgatcaggattcataatcccgggtcgggtcgggtctcgatgtcgaaattacacttaaaccccttactcttttatattttgcatctcgcccccaatgtttttatttaccccaatacaattataatccctttttactagctttttgctcaatgttacacttgaactatattaccaagtttttttttactgctgttttcagaaaagtatttactacaagcaaagtattaacaacgcatttggtctacaaagacaagagactgcattttcttaaagactatctcaacggagctaaactccaactcaaaaccatagctccgaccaccgtattctacatagagaaactttgtacgagaatcttctggcggccgagaaggcaaaacattagagatatctggaaactccggagacggtgggagaggcaaatctttcttcttgagagaatagtacacatcagctaagagaatccaaatgagatcaggatcaatgcaagcaagtcctctcaacgcattcaaagccgcttctcttaggccagttacactgctgtacgcaatccccacgaccaatcctgcaacttttttcaagactgcatctaacgctgaagcactgcgtttacctctggaaatctcggcgatcatatcgagaactgctgcctgcactttcaagctggaaacttcagcaatcgtagaagatgatgactcggaaatggttctgtaaggaagtcggagaaccgatttgttgtcttcccggaggatcttaggcgtcataatgtggaatggagacgttgttaaaagcttccaaaagtctgggccatcattgcggaaacgacgtgagaagaaatctcctccggatgtttgaatgattcgggttatcacgactaagcatctccgtacagcctgtggaaaatgcagcaggttttataatccattaatctagagataaattcggaagagggagaaagagattgtaccacgggatttctgtttcgtatgcaagcaacacagaatggccagattttgttgatagcgggtaaaagccggttttcatctgctccatcgtcgctagcattcatgtagtctttaagctgatagaatgaagcaaattcaatgacttcttcaattgtttctttggtttctgtctcagctcgataagcttcctcgactttagccagcgccactactccttcctgcataattggatatactgatttatttcgcttgcgaaaatgtcctagagagagctcaagaaatccgacaggaataatacctcaattatttcgagggaaactaagcatgagacttgatttgatgatgcaaggagaggcgtggccgctattaaacaagaagaggcgatcgaaccaactgtgcgtctgtatcgtttagaacgattcagttcaagcagtatgttttcccattcttcttcgtcttcaactattttgtcagaatttgaaactctctcttgtcttgatgtaatcgcatcagttgctttggtcttaacatggtcactatatgacttggctcggtctggtaataagcaagcctcgttctttgatgcatttacaatctcaccaacagcctagcagaagcaccaacaaaggttatgatgtttcttagacaaaaaaaagccaatgattttaaaagacttcaatagaaaaaaatgaaagattgaattaccttcaagaagggtatagttagatttggatgctgttgtctaccaacaatttcaagttcctgggaaaccaatcgcatctgtagatcccccaaaatggaaaaagaaagttcttaacacactgaatatgatgaatcggagtgtgatgaagatccaacagaggcaattttccatgaaaaaaaaaaaggttcactacaaatggccttaccggttcctccaacaaaggtaatatatcatgggcaaccccgatataagaaagcatagcagctagaacatttgggacatgaggattaagatccaggtggcgcagctggcgacaaatagagtcaataacataatccgcatttgcaacaaccagatgcccaacctgccaaacaaacaaacaaaagacaacaagatgttgattttaaaaacgattttatgatgtgattgaatattttcgactacattattcttcattctcactgtgggatggcctgaggtggcagcaagaagacgtaggacagtgtctgaagcatttctaacttggaaactcgagcaggtaagactctcaagcagaaggtaaagcgaagagtgaagaaatccacttgaagcaaagtctttccctagacacaaggaaaacacacctactccttctattataacttggtgtagcattgcactgtctcttaagaaatgcagactaatatgttgcccatcgttatcagtttggcccagaattgccttttggtccacggggagatcccaaacttcagaagcttggtattcatgcaggattttaccaacgcactcaatcagatttgtttttgcacgtttgttccaagagatttcccaggaaagtttgtctcttcccttccttgacttctgaagcagtcttgagagagcatccgttgcttgatcagatagaccaaagatcatctcattcaagatacaagcagcagttgccgcctggcgaactaactgtcctgaaccagttcgattacaccacgactgccagtcttctccattatactcctttacacgaacttctgaaaccaatttacggacaaaccccagaggaatatccaggatgactgctaaatgcccttcgtttttaaatcctgtcaaacacaaacacaacggagatgatttactatcagtaactaactcatttataagttaactgcagagtaattttcagaaaaatggttccgaaggaatatgaaatgacctgccattaaggataagcctacaagtctaaggattccagcgagcatctcgtagagcttctggctaccaacataagaaaaccagggaggcatgcgaggtaacatatggctactgggggacgatatctccaattttacttgatctgtttctgtgatatttggaacagcacggttgtatctggtctcccggaaccccacttttagttctgtgatagaagggaggtaacctgtcgatgatgaaggcctttctgcgatgagtttctcaagagaaccggtgaatgctgaattatggcttagacagagagaaaatatatccaggaatctgctagctgttatctacataacagaatgccatgaagaactaatcatatatcgcaagtcattattagaacatgtttggtttttcgaactagatttgctaatcaagaaagaagtagcaccaaacctatgagcgtgtcaagaaagaatacatacgggagactgaagatgatccgccaaaaactgaggaccggaataataggtgatgacaagtcactgcttcaccaccgaaagtgcaggcaattcctcattccccagaaccacttttggaagcctctcaagtagtctgttgtcaacaagccacggaagaagaataaaaaaacacatctctatttagacatctgcatacttagcttcaaaggaaaaaaacaatatacaacaaatacctgctaaagatcttttttatatcactctctacatggttttttgtactttctgagaataaatgatcgagaaattcctgagctgctacagaaacttcatcagagtcatcaacagccagagtacatacgcattcctgcatcattataaggaatttatctggtggcaatccttggaatggatatacccaatatcatgagttgttgttagttatgaacctaccaacatcactaatctagcacccttcaacgagcaagagctcttagagagcagtccacgtattgctgctagaaatccccatcgaattttgccggctgggtgaataagaatctgaaaccaattaagaattaccatttagaaaaaacaattccaaagggatttgggacaaatgtgttgaacgtagcacgagaataaatagcttacatgaggaaatgtctcacacagcagcttatttacgtgagatgtagtgctatctaaccatttcttcgtgcgttcaacaagaaaggagtcacgactcagattcagattggatttttcaggtacattgatgttaacaatctcttggtttgtaatttctgtcagctcgtcactctgtccttgagattttgttgtcagagaacgaagttcgtctaaaattgagtgtgcagattcatgtttctgcgacttagtatcaccattagaaatctcgagagccgatgaattagcctcatcctcaaggacgatcataagaaactcagctaaccctctaattgcttggtccaatgcatcaacacttcctgcagctccgcttatcattgctctcgaaacatgcaacactttgaaaacttggctaacaacaccaggtagaaaaaacgccaacacatcagcagtaccaatctgcaacaagaaacatgttctcattaggacccatgggtgccagaaatggtccaaaccatatatgcataatttaaaagttaccttagccacaagtatccgtaaagccataaaggcttcaactcgaagatttgcacttcctcgatgtcctcgagaagcctcagcatcagcgaccttgtggagtgatcagaattgaaataccttagaatgtataaaactacatgactccagatgaaagaaaaaagaaagcataggagaaaagagggttactttgagaagaatggaaagccaatgaccgacagcagccaaagcagactgagactgaagaaatgcaagcaagcattcacgagtttcaaaatcatacttataagactctgaaacttgagtttgataatctcttctatctgacagctgaggccagccaacagtgcgcttacaagagcaagaatcatcagagcatggaagcagaccagagatcattgctcggaaacatttgactatcccttcacgaaactcttcagaagcctcagatggtgataaaacagcaccactagttaacttcttcataattacaaccatctgtacggggaaaaaattcaacacagttccataactaagctgagaatatgttacccaaatcgagtaaaggtagaaaacaatcataaaaacgattgtgagagttcaaaaccagctcacctgatctatggatccaatgtgacatttttttagaagttcttcgagacaagagattacaccttctgctactttatcactcactctatatggtgtttgtggaaattcctctggcttgttttgcccctgacttctgcaagcaactgcggcgtctaacagaagaagcaatgggaacaaagtgtagctgaaacgtacataaaccaaaacagttctcactaagtaaacagtcgacaatacaccacaaatgaactcttttaaaccttataattgaaactgctactcatgtgcagattaccgttttttcagcagaaagaagtaaaaagataaagagaaacgagaaaagtggaataattactggaagaaggactggagagaggacggaggagtacggcggaggagaaggagcaaagcagggatcgtggttggatccttttcagggttttgcgaaaggtttagaagctccaagcagagaactttcagttgtgcgaagacagcttctctttccgggtctccctcaacgtcgtctccattggtttcacggcgtattacgacggacttgtccattgaatccgatcaattatcccaccaaactcgaaaatctcgagtcagcaaacagagagagatagaaccgcgaaattgaaaaagaaatgacccgacccgagattaattgacccgatccattgctattggcctttataggtcgtcgtcgtctcgaataaagaccgggaagatttcccctttagggttttaggaataaatgcaaaataaacctgataatctatatagaattgcaaacgaaacctcatattttgtaaagtatcgtacaaatgaaccgacattatatttaatagttataagaaccagattctttcgaatcaaattaaaccaatcggtttaaactttcaaactataaaccggagtgttaaaatgggtatcccaacccaatttgactcaattttccttcacttgaaccagtgataaagaagttgaaagtagaagttaatttcttcttcaagttacctatatattcttatcaagatcatataatatttcttcaatttcaagaaaactaagatttatcagaagccatggaagacaaaactgagatctatctatattaagcttccaactttttgtctatctccaatgaaattcaagaaaacattcggagatgcaacattgttgagattagcttcttctaattcagttgcttgccttaattcgttgataagttcatagttattgttacttcttcttcagcaaaaaaaatagctgttgaggttaatatatctccaaacaagagtaactggtcttcatgttttgtcgtttccagtttcaagatggttgttagatgattgagattactaaactaatcctaccaaatattcttcaataattttcttcaagattctctaagactaaagaaagaatcttccagatatatagttttagacttttagtatagtgtgcatcttttgaccagctctgttttatctacaggctactaaaaataatgccaattaaaaaactataggaaatacattttctctactatctctctacctttccatcatacatattgtcatattgatatccaaaataaatatcttttatcaatgtatcatgagctcgtagttcttcaagagtgatgatgatgatgattcttcttctttgtattgttgttgattatcgtcttcttctaacccgagttcgctttctaggtgcttgaaccatttcttaacctcatcctcatcagactcttcttctgttgttgctcttgagcctgagctgttctcatttgcagtggattgttgaaatgagtttgaagtatctaagaaactccaaatgtcaggatctgaatcaaatggtatctccagcagatcgggtttgtctacctcttgaataataatgtcgttaaactcgctataagcttcttctatatactcaaacctgagttcgtctatctttggatcatcttgttggttggaacccccagaagacatagatgtagacaactcattcctatgattagtctctctgttcaaagaatcttctacgtgagatgacttatcatctttcccacgagaaacagaatcactcgaacaaggcgaggccggttcatctgcagttcctgagctctgagccagtcttttctttagatgagtgtgccacacattcttgatctcgttatctgttctacctggaagttgagaagcgattttcgaccacctgatcaaaatgcagaaagcttaatgtcaatatcaaatcacttttttgatccaccatatatgtatgagcacaataataatcctagctgatgatttacttgttcccatagttgtggtgaagcttaatgattgtttcttcctcctctgaagtgaagttgccacgcttcagatctggcctaagatagttaatccaccttagacgacaactcttcccacacctcaatagcccttcatttttgcatatatatacattcagaatcataaagaaaagaaaaaacaattgaagaggcttttgctttgattgtgatgacaaaagcaatgacataccagattgtttggggagagatctccagttctcatgaccaaacttttgaatgaaagagatgagtttaatgtcttcttctgggctccatggacctctcttcactttggtcttgtcacaacaaggtgctcttcccttccccattctctctctctcactccctctcactccctctctcctctatatatataactttatatcactcagttcctgatgagattcacttttaccaaagataatttggttctgttttatatatatgagaggtaagagtgtgtgatcttgacatgagaaaagatgaatatgtaaacagaggaattgataaatgtcaaatcagatttgttgagtgggaaaaggttgtctgtctgtggtatggttgattatttggtatgattccattttctcatttttacttcatttggcatccttatgatgcatgcaacttatctttccttctaacaccgatgcatgaatatttcacattcgtttttagaaaccaaaatccttaaataatattttcttcttttttgacatcaagtaataatggaaactagcatctcgtgttaaaaatattatcagatttgacatatcttataaaattgtctgaaataaatttcgctaatgtaagaaactactacatgtcgacgagtgttaattgaaatggtcttaggaatttacagcggtaatgataagagttttatgtatttcttaataaaaatactttggaggagtaagaatatatagttataaagtggcaaaatattaggtagtgttttgactaaaataagattgtaaatctgcaacttgttaattaagaattagcttaaggtatacataggaggaattgattatattagtttttgtctgcgagtcttctgtaatcaggctcagtgtataattaccaacttttgaataatagatagtcccgtgatcatcatgtagatacagtgtaacacgagaaaaatgaactctcactaataatgctgttttactaagtacgcagtcactccatacgtcactccatggaatattttcatattttgtatacaaaaaagcagaaatatatataatccttaaatataacattaaaatgagagacagaaaaaaaaaaaaactgttaaaaagtcatttctaatcacatccgaaaacaccaaaaggcgtaaggagtgtgtgtgagcatagtgcacgaactcaccaaactaaagaccaaagagagtggaagaggtcaaagacttacgtctttttgacttttttaatgtttggtgggtttggtgttgttgttggctcttggctacgttaattacttaattccaccaaaccttcattacttaattaattcctctgtacccatccaaaattattcaagcaattacgacacagccatcactacatctattactccaaatattttaaagtactaagtatcgacaataattgaagttaataaacccaacaattttgttacgttaacaagctcttaggaggaatagagaggaaaagaggtttgaaaaagaagaaatatttttcactagggtaaatatctggacgtatatgtattgaagttacaaaatgattaattcggaaaattttgtcgataaaagtctataggagcaacatatataaatgacgatctattagttttgcatttttatacgactcttggtaatcagaaggttggtgaacaaacaagtatgagtgggaaaactttcccaaactttactaagaaaaaaaggacaactatgagtggaaaaaattaaattaaattttcaacgtccctatggagtatggaccttatcaaaacgatggaaactgtgacattaattaagtagaataaaattaaaaaattatgtaaacttatgatgaaagaacacatgttgctattagtaatacatacgtcaatatcaatttcgagtgtactgactttaaagttcagattttagctattggaataaagctctgcatgtgtatgttttgtgtgatcataatagggacacatattaatatatatcaactatttatataagactatatatacataaatatgcttcgctttttgcgtttgttattgtattattgtttaggagatataacaccttatctaataaaaacaaattctcgatttagaaaacaactcatgcgccaaagatttacccataaaagagtccaatctttcaaaaatgctagaagtttagaattcatgactagatatactaacgaaaacaagtaattttgatttttgtaagtaagttttaaaagggaaatacaattaaatcataattaaaatgatctgataatcacctaaacaagatttttccaagagaccaaataagacacctaatcttgaaaaaaatagagatctcaaacaatattatccatccttgggttgggttggtaggacatttgcttaacagtgatggttacttttttcctgatcacctaactaatcacactcattaggtccaagcacagtgctaacatttccaaattaaataaaataacgccataatattcaaacatagataaatcatgagattcatgacccaaaaaactcaaaaggtaagcagataaaatcaatgattacgcatgcatgacgcacatgtatttgttatgggatctatttcaacagaaatgtgttggttaatattttaggtttttttttttagtaatcagaatatctttatattaatctccaaagcatgcgaataccatataaaatattattatatacggtcaaccataattaagatttgaacgtaagcaattattcaactactagatcactgtatatggaccatataatggttaatattttggtatttaatttattacccgataattaggtaattattcgatatagtaaccgtcagtaattattacatgacacaactcgttaacgtgatatttaataaagacctctcatttctctccatattagagttgtttattttcgaaaatggagtacataaacatctcatgcaccagtttaaaagggacgataacatgcgggaagatgtagttgggccggatttcgtagatactgggctaaaaatactataaacgggcctgtctattttttaattcttttaattttggtagaaacgggcctgtctaattgaaaacgttagttttaacttttaaaattagaatgaactaataactgaaaatacttgatctttttttttgctaaccaaaaataaatacttgatattggtatcgtattttaacattatatccgatcatctattttggatattcaaatttgacgtttttgtgtaaaactcggatgtccacaaatatatttatcatacatttttgataaaacatgcattaaattcttcacatcaactaaaattttgaaaaataaaacagaaaatcgactgcagaatgagtaatggcctgggaatttaaggtttattatatgcatttaaaattttaatatatcatttaattttgaatttaataaccacaccaatattccatttaaatgcattgaaaccccaagaccagtctcactgccatataaataaatataccaaaattaatttcacagttacacatttagggccagccgtcttgttaagaatatgtatcctcaaaaataaaacatcgagaaaccatagatttaaaatcttgggaaatttgcaagtataacctaaaaacatttaataatttggaaactaacacttcaaaaactataaggtgatattgtgtatattatatgtaataaatacaattataccctcttcttctttcttatgtgtgaacattttctcttttctttcttcttttcttccactaccaccacaaccaccactacctttaaaaccattgtcgccgaaaaatcgtatccggagccacatcgccggaaaatcgtcaccggagccatcatcaccattgtactattttattttgctgttagatttttgaaaattgaaagttgagatgatttcatttcgtttaatgatttttgtttgggttctatgtatagtatcttagggtttagttttcttatatcaatatatatttgtaattatcttttcgtcaccggcaccgccattatcgtcaccatcgccactaacaccgcgattgttgtcgtcaccatcaccaccggcactgccactgttgtcgtcaccatcgccatcggcaccaccattgttgtctcactatcgccatcggcaccaccactgttatcatcactattaccatcggcaccgctattgttgtcgtcaccatcaccatcggcactgtcattgttactattaccatcttcgctatcattaagctagccaacacttttctctttttatgtatgtccataaaccaaaaaaagtgtgaaagatcacgtcactcttcttctccttttcacgcgcgtgttctcatgttttaacgaggagttacttgactttttatccctctttagtgttatttacttagttttgcatattaaggtgctatattcttaaatagattatcaaacatggtcagcaaatcatcctaaaatcttatatataaataaatcttaatgaacaatgcataacttgttactccagttttgatttgttttttttttccttaacaataaaatttctattttgctgaattatttagtgacttttgacgtcaaatgaatcaatcccgataaagtaatgtcatttttttcacacattcgtctgtgtttgtgtatgtgtgtgtataagttaataaaagctattaaatgttaggtgttatgaaaacgtccgtgagcatcatcacttcgtcaccctaagaacctaaatagaaataaatagaaataaacttccaactttataattattcaaagctctttgggtttgttcttaaatgcatacaccttcctatttcctaaaaagccaattactaattaatatctcaccacattttttctgctattattttaaatagtttttcaaatgttgacagccaaaagaaataacgaaaacataatgtcggtacagttttgctagagattgtaaataaacaatctagaaagtgttactaatatgaagtcaacacggcaagaaactcgaaacagcaactggaaatttcaaacaatattaaaactcgaaacagcaaagaacaagaatatatttagtgaaattattgagtaaacattttgaactaattgaatcgatttttgatggcagaatcaatcacggaagccaaaaagagaatatagacattaatcactaattaaagtcgtaagggaggtttgaaaagtaattatggagagacgcttcggcaattaatgcgtctcattttcaatctctctccctatatctatcgtagagtatttaataaactttggctctttcgcctagaattcctctcctccattcgacgattcctcttgtaacaattactacaatattagtctactttcggaaatacatatttcgagactgattttgaacagtgtttcaagaaaaatactgctcgagtagaattatcactttatcaggtcgtttgcatgaaaatcgcatcattttgtatgaaaattcatactatttattttgcaaattaaatagggatttaaatgtgagaaaaatatggtaagggtatgaagaaaacgaatagtgagaaaacgtgtagagcgtgaaatagggaaagaaaaaaaaaggttagagatcaacacacattaaatacattaaaatttaaatgctagtcaataatggtacaacgataaatgtaacccctcattaaatactattagctctttgcacaccagagaaagtaaactaaaatcaattttgaaaacgaaataaaaacgaacatttaatcgtataatatttaatactagtagtaatcaattgaattttttttaaaaaatactattatataacgtgccgcatttaattttgccccatagactttaaaacaatttctacatttcggcccttaaatattggctccgtctatataactctctctgcgtttacacatccccccattactctctctatctctcgatgattcttgatatggctgctgacgtcagctctctcgtacggttactaagcggttacaaagatgatcgagcggtggttaaagattctgccggagccaaatcctcggcggcgctgatgactcgtgaccttcttggaaacggcagaggaggaggaggcgatcggtctttagagcttgacctcgaccttcaagtccccaccggttatgaaaaacgcctcgacttgaaggttcgtgttgaattgatggatcctctttagtctttcctttagtggttttggctgattagatcgtatcattgttgttttttttaacagtcagggaaagtgtatttgcaacgatgcaattcaacgagctcgtcgtcaataacaaacgcagaccaaaccaatcaaacagtaccaacgtttcaggatttgaattttcctcctccgactttgaacaattctcctttgttgaacctcttcgacgatacaacgccggaactgaagctacttccgtcgtctcgttcttctcgtccgaacactagtaatttacagagtgtatgcacactggacaaggtgaaatcagctctagagagggcagagagagatcctgctatgttcaagaaacgtcaatcaccggatgatacggtttacgatcattataggacggaggctgtagcgtcaccggtggttgccggatgtcctggttgtttatcgtacgtgttggtgatgatgaataacccgaaatgtccgaggtgtgataccattgttcctttgcctacaaatcctatgaagaagaagcctaagattgatctcaacatatcaatctgaatgttttggagtttatattggaacatttttgtaaatgatagataacaattcagggggtttattttgtaaaacttaagaaagaagaaaaaattgatggtaaggaaggaagattagaaggatgttaatggtgttttttgtaaatgcgttagttgaacaacaacaagaattttatttagaaacatagtaattcacggaataaatgagtcaattaaatgacgacaattaatgttacaattatcttattttctacttttgaataaactcgtagtccatggttggttggaaggtagtttgaattcattgtatatgtccatctaaatgcactgtctttttatgaaaagaaaaaaactattattaatagtgttatttgtcaattttgttatatattttaaaaaactccttgataatgtttggcttgaaattgtatccaaatgcctctcttatctgagtggttatgatttcctgaaattgatgactactaattactaaatgaaatgaggaagttgtgtttgcatgcatgcatgatatcttcaacaaacatgtttctcaacccaattaaagataaattttcaatctctgtgtttggacaaaaattgattataagaaaaaggcaaaaataaatgtgacaactgtttaatttttttgaaggacattcaatgttgtaatttatgtgaggtttaactttttaaggtcattcaaagttatgctgacctaacttcaaatgcttaggtcaacagagcacacatattcacatactatacgaataactgcaagtctgcaactaacgtaataaatcgcggctattaaaatccgatatgcatgtagacatgtagtagtaaacttatcttattagtatttttttaaaatgtcaacgaggtaaggaaatgtagaaatgcaaatactcacgacgagcatatattacatggacgtaatttctccgatattatactacgaccgacgagtagatgagttagatttattacgatagaatttatactaacggtggacctgaaataataatatttcgtaggtagtatagtttttgcattaaacagttttgtatgtgtgtggcattaatacattactccggatgggatacgtatcgtatagattgtatggtttgatattcatctttatccataacaaaaaaaatctagctagtgtatatttttcgtacgttacaagtttcgaaaattaggtttacgtctataattatatgacaaacatattttaaatatctaagtctcatcttcaatggaaactagtcctaaactcctaagttgatgtacgattttttttctcgttaggtggatttcagattataggaaaatgatatagaaaaagaaataagaaaaaaagaagagaaatggagaaactcatcctaatagaaacgaattcaattaatgggatcgtgacctctaataaattgtaattaatgctcctgctacatttatgaactttggtcatttcctttacgaaaacaatgtaaattccacgtgtcaacttatttgccatctctccattaattgattttggcatatttgtttcatctcgtgcttttcaggaaaaccaccaaaacaaaataagacgagaaaaacgatatcgtatgaaaatgtgatttctcatagttacatgtaattataagtcatacgtatatccgaaaatgtgaacaattcattatttgtccatgtttttcattattgaagcacgtacgacaacgtttgaccagcacattttttggcccaatatgaatccccatagagagattcttttttggcccaattaaacagcggtataaataaatgggcctagcccatgttgtttttatttttatactattttattatttccaccctcttcacaaaaaccctaaaccctaatttgaagttgttcgattcgatatccttgtgtgtgtgtgcagacagttttcattttccaattccattactgcctcttctttgttgctggttctgagtcagtggtgataatgggcaaaaataggcgtaaacagaaggttatacctccaccgctgcttccgccagatgtagccgaagaggatattgagttttccgacgaggatttgaagtatgtcaaagagaacacagattacgcccaattcgtctctcaaattgacaccgccgctatcaataagtgcgtttacgtctcttttcgaattgttttgcaatttggtgatttttagtattagggttgattttaccacaatcaatacttgctatgtccgaatcgagtttgaatctctgcattgataatatcttgttacgctgttgttaggcaatgtggtggtagagtaatgacagtggaggataagtatgaagaagaacgatcaaagaggaagacacttcaggaagagaaagggaatggcgagatccttgtggatcctgttgatgtgctccctgtcaagactttagatggaaaacttcactatcgaacaggtgagaaatgagaagactcttgtgttttttgtttaatggctcgagttgagtagcattctaagtggaggtttttctgttttgtggctactggttcagagtcaaagaagtcaaaactagctgaagccgaaacagatgaagcagagaaggatgttcttgaagatgaacatgtattgaacaaatctcaaagaagagaaaaagctaaaaagagtaaaagggaggcaaagaaacatgagaaagatttgcctgatgagatattacaagaggaagaagaaactccccaagccgctgttctggtattgcctgttttgagtttctctttttttcttggttcattatataagttgctaaaaatttcattgttcgttctttgacatcatttttcattttgagcatcatatttgatagctttctgcatcttcatcgtttaacatctttccattaaaagaatttataagaacgtttaatcattggtatttgtaatttgtaatttggagcgttttagtgttttccatatccattcatcatgtttttttttaacgtgtgaatgattctcttccttcatcaggcagaagtgaaagaagaactatctgctgaagagtcatttgaaaataagaaaaataaaatcgcggaattgggaatgctactactttctgatccagaggcaaacataaaaactttgaaggatatgttagatatctgcaaggatcagaatacgaagattgtgaaacttgccttgttatctctgttggccgtatttaaagatattattcctgggtaattttattaatcttctatgtaccttttttcctcatttgatttgctaattattctcttcattctccccctttaattatgttggtaattagctcttcttattttttttgtggtgccagctatcggattagacttcctacagaaaaggagctcgagatgaagatctcaaaggaagtgaagaaaacccggttctatgagtcgactttattaaaagcttacaaggtgtgcatgtcagttatatattattcttgatttctctgagtataattgtaacacgttttcctttgcttctgatgtccttaacagtcatatctgcagaagttgattatatttgaaaagcagtcagtatataaccaaattgccaatcggtgcctttgtacattgctggaagcagttcctcacttcaactaccgtgataacctgttaattgctgttgtcagaaatatcagctccccagatgaagtcgtaaggtcctggttcttttaaccctttttcagagtgacgaataatgtctaactgatataccatggaatctaacgtaaagtagaactgttaatatctcttgtgtcatagtcatgtcattttactgcaattgcatccatttcgttcctatctaactcatttcttgcaccggtttgggtatgcaggagactctgttgctctactatcaggtatcttttctcaaatgaagggaaacatggtggtgagctgaccgtgcaagctgtacgcctgattgctgatcatgtcaaagctcacaactgccaacttcatcctaatgctatcgaggtattcattggtattattttaacattctaagaaccacacatttacacaccaatcactgagtaaaggtgttataattgctcctgtttgaaaaactaaatcacgaagttcacattatcattggaaaacattttgtaagactattgcaagcgcttaataactgaggagcaatctggttatatttcttatctctgtgtttgttctcatttacccttgcttccatttttctattgatccttaggtgttcatgtccattcgctttgatgaggatattggaaagcctaacaaagaggatgaacataacaagaaatataagaaaaataataaaagaaaaacccaggaggagcaaaatcaagtgcaggaaaatgagaggaagaaatcaaagaaagatatgatgtctaagatcagagacgaggtaatttactttccttctgtgccatagatttgttggtgttttaatcttgttttctctttcattgacaaccatttatatgaccaaaacatctaaaattgatttcccgtcgtactattggtttgctataaattgatatttcttcattacttgttcttaggtttctgctgatcacagaggagttacctatgaaccggatgctaaggagcggcgaaagatgcagacagagacactttctgctgtttttgagacctatttccgtatcctgagaaacacaatgtatacaattggcgaaaggtatctatatatacatttttgcaaccattttagcaaataaatcctaaagttggacttatttacaacccaatgccattagcattaaatattttttccaaaataattaactttacttaaaatttttaatttaaattgtcaatcacattatcaatcaaatttaatccaatcaaatttaatccaaacaaagttcacatcaatcccttaaaattagcataaacgtattttattaacaatattttaaaacaaagttttttgtttaaaaaatattgttcttactaaacgttttttgcttaaataaacaaatcatgtatttgaacttatttacaatgtcacgctactgacattaattatttaggcataaaaatatttatttacagatttaaatcttctaaatttttgcttttagagttattatatcattacctaaaaggcaaaaaatattaatttttaaatattattatttgtatatttaaacttcataaaacattattaatatttaaatttataaaaagtttaatctatcaaaaataattaacatcattatttaatatatagagttaaaaaaaatctcaaaaacaaatcgtcatattttgtgattcgaaattttatgaatgaacatatattaaccaattggcgaaaaatgtgtgggttcaacgtcccgcaacgactaaaatattttgacaatgattcataaacatattataaataagatcaacattaataaaataaatagtttttttttgttgacgggtttgtcaggacgggtttggcaggacgttacttagtaacaatggtaaactataaaataatttacaaatttttatatatattaattttaaaaaataaattgtctccgcggtgtaccgcgggttaaaatctagttttcatatattttaaaagctaatttaaattgtgttttcagttgtcgtgagtaggaattaaataatgcttatgttcttatcaaaatctcaaaagaatatttccccgtctgcaaaatcggttccagtaaaattcttggtgtgaattctcgttggctttacagtcacagataactatttaactggtcatatgtctgtgtcagttattttaattctattttacaacgtcactttcactaaatttcagaacagaagaaattccaacttcaaatccgggtgcctttggatcgcaccctttgctagctccatgcttggatgggttggcaaaattcacccaacaactggacttggactacatgggagatctaatgaactatctcaagaagcttgcttctagcagtagcagcgtctccaacaacacaaagcagaaaaactcaaaactgttgacagtatctgaacgccttaggtgttgccttgtcgccttcaaagtcatgaggagcaacttaaatgccttgaatgttgacttgcaagacttctttgtccaactttacaacctcattctcgagtaccgccctggaaggtttgttataactttttcctcttttttaaccacgacataagttaaatctagtttagtctaaaacactttgtgatgtgatacagagattcaggtgtaatcttggctgagtctctgaagataatgttgtgcgacgacagacatcaagacatgcaaaaagcagctgcatttgtaaaacgtttagccacattcgcgctatgctttggatgtgccgaatctatgtctggtaataaacattacaaatactttgaattacacatcgcatttcccttatctcaaatctgtcgctcagtctctccaattgtctttcttttatagcgctagtcactttgaaaactctgcttcagaagaacgtgaaatgcagaaaccttctagagaacgatgctggaggcggctctgtttccggttcaattgcagtaagtcacaaatatttagcctcgtatacagatttaactttagtaatatgatttgttgcttagcgaaatctctcgattgcagaaatatcagccgtatgcaacagatcctaacctaagcggggctttagcaacagtgctttgggaactcagtctcttgagtaaacattatcatcctgcgatctcaacaatggccacaacagtctccaacatgaacacttctcagagccaaacatttctttctgcagtgactccacaacaggcttttgcagatttctctcttgtaaaggaatcgtttgagccgaagaacgagtctcggaaattgaacaacaaacggaaacgggagagtttgcctgaagaagctaagaatgttccggaaatagacatggttaagctcagcaagaaattgaaagagaactttactattcttcgggatataaaagaggacgagagagtgagaatggagttgttgcagtctgaagagaaaaaaccattgaagaaacagaacaacgtggtgaagaagaaacttaagaaccctaaatccaaaaagcaaatttgaaaggctttttgttttcccgctttaacggttatatactttgcttaaattaaacgcttcaatgaaatttttcgagtacaattttgttaaagagtgaaatcaacaagaagagtatttttcattttattcacatccaccctggtaatcctaaaaacttgtgtttataagttatgatgttctcgtatattttcaggattatttattcgaactgattcttataaagtggtaccaacatcgtataaaaatccatcgtttatacaaaacaacgtagtcttacatgtgccatagagttgaaagatacgcaaatcatcctctaatccactaacagttcgccacaaaccgtttactttgttataaaaatagagatggagatctcagctaatgtatgttgtacgctgtgaacagcaaattgttccccacaaaaaaaaaaagtccagccgtacaacggtacaagaagatacggccatgttgagaccttttgttctagaccccattttaatacacctataactataagtctctcgtcgttactacaagatatttgctactttatactatatttttttcgaattatcataggtcttcaattaataagtacaaaaattcaataaaaaatatgtgtaatcattatagtggatttacatcttttcatagtgtattatccacgcaagactcacatcgcatcatatatctgaacttttcaatcaattaaatgttaggtgttgggacgatatcatggatatataattcatattgacttcaaatttaaaataattattattattatatagttgatgatgatccgtagtacggtacgtgaaataacttgtattttgtcacttcaattttatttcacagtacaaattaaattgataattttgagataaaatcgaaaaaacaattttcatatccaaatcatcaagacgaatttctccgatcactcaaataaaaaaggagaagatcgaagaacaaaaaaaaaacagaatcatcatcatctactctgtagatacatcttcaccagataacgatgcaatgagctccgatgtatcatcagcgatgccagatcggagagactctacaacctgctcgaacacgaatacgttacaaggaatatgaagaactcctttctgagtgtatccgtattcttgagctgatcgattcagcaatccaacgaaaacaggatgattcagcagctctgcactcaccacgaacctctccttatcttcgcctacgttgacgggaacgtgaccggaaggaacactcgacgcgacggttgctcgcttgaccaagaaaactgaagaggagtacgttgacgtcgggtgatggatatcgccgctgcgatttcggttgcaggaggatgagtctgcgattcgtgacagacgtcgaatcagaggcttcatctttgatcctagacagccaaaaatgctagagacagagagacataaatatgggagagaggtgtggactcacattaagcttatcagaaatgtgtatattaagtattattatattttgagatgacacaaaaatggtatttaatttatttcatacatatatgtgttaacataatgagtcatggtcaatttaacaattgaaagaactacctaattttgattatgcaatatgagaaattctctaaatttggtttattttcaaaactttcctcacttacattagtcaaattacaaataagaatagtaagggtaattgttaacaaatgtggattgctaaaatcaaattttgattattgtacaaattaattttagacttttttatgtatgatgaaatgtacagaataaaccaagagactatgtagataaaaatccgttgtatttattaatctatttcttaccatgaatacgtaattttcccgtttgatggtaaattaacatataaatacacagagacgagtggataagaaaaagacgtagtatttattaatttactttttatttgctttccatgtatatatattttcatatatatataaaagaaaaagagtataatttagcaaaataacaaaaatataaatattgatagatggtttttgtatcataatttatttaattgtatttctggaattaatattcttctttgactagatttcataagaaagtaaacgaacacaaaattaatgttcatctttgactttttttggagggaaaagagtgtttaaacgtgggagaacaagaaacaaagcttgtagccaaattaaatagaagacaaataatcattagtgagaaaaattcttagattcctaatcttctttgtgtcttttccatcaaaccctaaaaagattcacgtaagagatgtcgagatttttggaatagtcaaagaaggtcgatcggattttgagctccctattgagattctatcgataattccgacggattctttcgagcaactggatctcgcgaagaggcgattatctgtaaagtgtcgaatttggaggaagaggtggtcgaattgaggaagaaactccatgagatggaaatgagtattcacgagcttgaaagggatgtctaggcgtggttagttttcgacgttttcaaaattaacacttaaacttatttttaaaaagtaaactgtaaaattaacatggttttagttaaaatttatcagttattttaaaattgttctaattttttttagtgaaaattattattattttttaaaaatgagtttaagtgttaaatctatattacgtgaaaaccatgccgaacttcgaacaccacaaaacttacggaccaactaaggacgggatgcctaggcgcggttagttttcgatatttttaaaatttaacacttaaactaactttcaaaaattaataatgaaattaacattgttttagttaaattttatcaattattttcttaaagtttaaagttttaaattaccactttaatttaaatcttttttttaaaaaaatatttttatatttaaaatgtttatttgaaatatattgccaaaaatacccttaaaatcaaaattaattaataaaaaaaaattgggaaagccaaaaacctggatttgctgaatcgttgaaccatcgaaactccaaagctgctatatagtcttcggtttcactgtccctcttttgccactttcttcctcgcatcattagccgccggtgaaagtgttgcggtggtgatccatatggaattagggtttgactgttatgatatcaaatgcacaacagaggatataaatcaatatacgaaacgagacgatccatctcttacgggtaggttctgagatgaatccgttgagatcttcttaacaaggaaaataaccggatggatttgttgccgagagtggctctacatgaatcctatcggctttacgagattggatcaacgatactttccacgccgatcaatcaatgaaacgatgctttccgctccgatatcaatctaactcttacggatcatgttgcagagatgatcatcatcggcttttcacgtcttcaatgtctactaattggatcatcatcgaattagagagttttgattttatttcactcaaagaagaaagaattagaagttgtgcgtgagagcgtttttaggtctaatcccaatggatggatccatgttatatagagattataatagagccgttggagtcggttatatttccttattttaatacaaaaatattcaatagaaaaaaggaaatttcattttctttcactggggtttatttatatttatgtacgaataattaagaaattttatgatttgatttttgtagtacacatacacataagttgaagcaacaatgagtcccctgtctgagttcgacgagaagaaaactatctattcaatttcaataaatggttcagcctctgacccaacaatagatatatgggtcgacccattgggcctgaatttaaatatttggaaacccataaacgagattttgtttctgcatacgggtttagaatgaccgcggaaattaaactcctcagagtccagggagcaaaaaatctttactaggagaatactggggaaaattgcagtgttaatccattcttcctcgaggaaattgttttgtgttcgtattgttttgtgatttcgtctaatatttctcagagaagttagaagtagaagatttgaatttcattgtggttggtgaggattgtgcacagaagctgtttgatagaatgtctaaaccgttattatacagaaggtcttcgatcttttccgttattttgagaattcataagcttagagaaactgaaagtttcgtgttgtttcctggagaatcatctagtagattgcaatggacgtttgttcaggtgagacacaagtctggtggaggaggatggagacctaagcagaaagtatatcatagagttcatgaccttgataaagcaattgacttgaacaagaaaccatctctgatacttcagttgaaatctattatccaggcgcagaaacatggaagccttcttcttagagatcttgagaagcatgttgggtttgttcacaagtggaacttaatggctgccattgagaagtaccctacgatattttatgttggaggtggacacaaagaacctcctttcgttatgctgactgagaaagctaaaaagattgcagctgaggaaagtgaagctacagagtcaatggaacctattctggttaataatcttaggaagttattgatgatgtctgttgattgtcgagttcctttggagaaggttgagtttattcaatctgcaatgggtttgcctcaagattttaagagtacattgatccctaagtacactgaatttttctctttgaaggttatcaatggaaaagttaatcttgttttagagaattgggattcttcactggcaatcactgcacgagaggataggttatcccgtgaaggattctccgagtcagttggggacagaaagagggtcaggatcacaaaggatggcaatttcttgggacgaaatgcgtttaagatttcttttcctcctggttttaggcctaacgctagttatttagaggaatttgagaagtggcagaaaatggaattcccatctccttatcttaatgcgagaagatttgatgctgcagatcctaaagctaggaaacgagttgtagctgtgcttcatgaactgctcagtttaacaatggagaaaagagtgacatgcgctcaattggatgcattccactctgagtatctgcttccatcaagactaatactttgcttgataaagcatcaagggatcttctacattactaacaaaggagcaaggggtacggtatttctcaaagatgcttatgctggttctaatttgattgagaaatgcccattgctattgttccatgatagatttgttgcactctgtggtcggaaagaagtcaatttatctaatgaaatgcagtcttcaagtgttttctcctaatcttacatcaaaccagagatgtgtacccccaaggcatattacccattgattatgttccagcaaataagattcagtttataggactctgaaccttataaacatttaactgtatcatttcttcttaccgtcagtgtcttctcgtgtgaagaaatgaaacgtacttgttaagatattaaagttttcaccaacaaacagaagcgtaaatactatctggtgattgaggatgctgaaagccagaacgtgtcatagcgtctggaatggtacccaagggagatgtgactggcttattgactaggtactgtgaatgtgatttgaactatctcgtccatgtggaggttgtggatgcagttagtattataatacacttgtttttatctctgtgtacacgactctcttgattgttttctggagaaaacgataacggaatcttcttcgtgtttacacacgacggaacatttatttgaatgcagggaaagggggtccagaactcatgtggcttgtgaaggcatcatgggaaaagagccaaagggaaaaacaattaagtcacactccacaatcccccattttagacctgagtcgcattcatgctcaaaaacaaaaggtcagtgttttcattattagcctcttttatttttcttttgacagttctatggtaaaatacacagtgcattataacaaccaagtcctgtctcgttgttttctgctggccccgtttttgtttctacattgaaagccttcattttttaaaattggtttttggggataaacaacaaaactctctttttcatggcgttggatggtaataggctgctgatacatcaatattttgctttgctttgttggataaacgactagtaaacatttggtttctcgtgataaactgcgtagttagttgtctgtttttgttcttagtaaggttccgtgtcttgtttgaacatgttaactaacctatatatagtcgaaacctatcaatttataatccatagaaaacaactaatggcacaaaagaaaatccaaagtcagattcttttattttctctttcttataaactttaacaagtaaatggattcctgtctttgtcatttggcatctcatccaaatgaagggtacacaatttaagcataaagacaagatcttgaagctgattgaagcatcaagatcaattaaacacccatctttgaatttttttttgttctcttttcctattctacctttatgaagccaaatcacataccaaaacgtgaggatcatccactaacatcacgacttataaaccacgaatttgaatcgatacgctgatattgcattcgggttatagaaaactactgacaaagacttataaccacactctgatatttgaattttctccttctaaatactgaaagacacagtttctattgattgatctgggaaacttgtctgtacacagacaaagacattggctttcttttaaaaaccaaagggagccccatttagatactttttggatgatgatgcaaaaataaacaagttgacacataaaagatcaaaactttaggggtatcgttttcatgtatggaggtttttgatttccttgggacaaaattatatggtccattattgtacagtggtcctacagtcccaaccatttttctgtgaattatatgtgtactgttttggacagaagaacacatcatgcaatcccccaatattattttccttcgttgtttggtccaatctgaaacctctctctctctcctctcctctttttcttttgaaaaatcgttttcagcatttccaaaaccccaaatctaattcagttgtcaataaataatcaagtacatttttccagaagtatttgtactgctttctctgtatagtattagatctcaccttaatgcatctttcttgattgatctaattgtccataactaattccatgattatgttataataaatgttgctttgtttgtggtcattacttggtgttgattaaaagaagaaagatgccatctttagcctgaagctcctctcatgcatgtctgttctttttttaactgttagacattgctagtttcaaaaagtaaatcatagacattgtacaaaacttttgatttctccccatttctcttttcttttctgttgatacccacatcagcagcactttagttaccttttcccaacaaaatatctttttattccattgacatgtagtccaatctgattaccctaataactatccacatgaaaaaagagtactttcataaacataaacactaaactatcatatgtgtgtatatataacagatactttatacaaacatattccatcttggatatgatatctgcccattaaccccaaccaaactacataaatgatttgggtagttggctttctttctcttcttttaaaatttgatttctttttaaactttgggatatgtatgggtgcctaatatagacaagaaagaactattgcaaacacctttcttatacacttttctctgttcaagagagaaaaaaaggtatccatgaacagttaatagttgtggggatatcaaagtgaaaacgaaagagagagagtaatcatatagtcatattctataggtattcagatgggtctataaccacgttatcactcttattgaatcaagttccaagttttgttatgacagaataacattatagaatctgacatcaattctgcacaaagtccaattagaggaacatctgtgcaggctcgttgtgatcataatgattcatattgttgtgacttatgagagaaaataaagaaagggaaaatcttttgaggtctaaatcaaattcacatgagctttgcagtgttgtggttcagtgggataagactaattacatatatattcatcttttgaattggatggtactaatgatgagaaataaacaaatgtcttttgtggctttttctgcagtgattttcagaagacttcacaccaagtccactcactgtaaaagagggaggaaaaaaagagagaaatagcattttgctttggcatttgtaaatggtaggtcactgatattcccacgtaaaaggaaaaacaaaatgctctttgtgctttttttttagtatttatccctttgtgattgtctttgccaaattatgtctcatcgtttatcacttcttaacccttctagttctaatatccctttgtaagatttaccttcgaaacgacatttcaaattaagtttatctataaatcgttgtcaacaattgatgtctactaatctagacttttatatatgaatattcaacaactatatagtagttttttttctaacaaacaaaaaaggtcggttgcttaaaggattggtttgggggtaatcctcactttgaaatttgaattcctatatttttttttggtgggattgtgattccgattcacattattgacaagagtgttaaaggttaaaagaggtgacaaatgtttttgttcccatttgggctcatttattcatagtaatgtagtcaaatcgaattgatggcttaagggtgaaaaatgataagtgggcccccatttcccaacaataagatacacttagttaatttataatttattaaattaataattttcttaggaaatagaacaaaaaaggcaaaagctaccaaaatcaatagggtagtgagtttggaccatttcatgagtgccccctttcacaaggtaatctataaagttttggtgttccccatcatgacccctcctcacatctatatctctacttttaattattcccaaagacattttcatgtaatctattatcttttacatcatatcgtgtttatgccacttacgtgtatatgggaataaaatcgttttgtttagtggttgttgcactctcaaagatgatgtttgatgtatttttgttatttaactagctaatagttgttgtatgcattattgaactcacatgacattctatgtttctacggtttgattacacgtatttgatatttaattcctttctttttctttttttcaataaggagttaacttgaattagtattttctttttttcaacccctaagctgactttctcttatatatatatatatatatatatatgcaacaaggttggattgccattagagctgatgaatagtttttaagaaagtctttggaaactaagttaaacacgacgtcaataacacaactaagatttcactcaaattcaaaaatgaaccgatccttttaacttatttatatatcattcgaccttataattttctcttaaaccatatgacatccaaatggtgcaattttcatgggacgagagtcgagaggttgattaaagtgaatcaaatagtatttcttcaataggtttaaaatcgtaacctccaatgcaaaaataaaattatataaaatgaaagagagcaaccccaccaacgctgaaatattggggaaattaaaaaagaatatctaaaaagagaagtggacaagttgcatgacacaaaccctaacaccacaacatttacatatcccatcactttacaccaagtcttccacttttgcttcgtttgtttcgcttatatatatataaaaataatttaaaagaaagcataaccgtagggaaatggtccttagattcttcaaaagtctccaaataataaaagtaatttaaacaaacatcaatcggtcaagcgtcactctcttttctttctttgtttttgcttcatttgttgcttagtgtgtacgtgacgattggttccttcccttcatttactcttatctccattttcaaaattacatttattaaaaaactcttcaaagttggataaagttgccccaaattgctcgaacccaatgctaatagttataaccagtattttttttggagcttgagtaagatttctactctttaattactatgaaagatgatttaccacttgatttgtcttatcaaatattagctgctgaccaagaataattctaagaaaattgatgttgcatgaagatgcatacaatataatggtagtgtattatttcacattcaccacctctgcacctcacatgtatgttcctcgatattttactagatttctatttctaagcatgcaacacatacaaacactagatcacatgttaatgtatgtgtaaataatgtcacaatatcgatagtggaagttcttttattttgtttcgtgacatccgatagtgcaagatttaaccaacctttgcttaaagaatttttttactttcggccttagaaaaataccatatgttctgtcaaacttaacgtgtgtttctttaagaataatacttgattaattagtagtagataatattgaacgtttcaaaaatgtcatgatttagaatattggacctccattggttgatccgcctgtgaaggcacaaagatgtctacatctatatatctaataatatacaaatcagaaatccacttagaatcgtatgattaacataaataaatcaaatagagatgatgttttgatattctctaggtatgaaagaaataaaagtaaacagtagataaattttggctttaggactttttattcgtgcgacgagagtatatcctctttaatgttggcatgatctcttcacatcgctttctcgtgtcctcttccttttttttttttttttttttgtttatatcttaaaatttcttttcaatataataaatatctattcataattctcagacaatattcagcagattaatcatgtataaacatctgttaaagcacaactttgaaatcttagttatacaatatgatttaaaaactaattatagtagattagtagtcatatcatacaactagatggaattataataaaacggtgacatgcatagaatgatagaaccaattatctgatattatttttgtttaattgtcaacgatgacattactaaacttgttttataatttttcttatataagtatgaaatgtttatttataatgatttaatgctacgtaagattatataatattgataataatatgtaaattaatcagcattgcattttattttttatcattataatcatattaaaatatagtacatgtggaatctttgattcccgtaattaattaattaattatgtaaccacataaaaatttgggtagaaaacaaattgattgagaaaataaatgagaaaaaaaagaaagagggaaggtgtcaggaggagtacgcaggacgaacaacagcgacatttgcgcgcgtccgacgtgtcagctttttacctcttccactgtctctttccctcgttttcaacgcgcctttgccggcgtctgtcttccacgctctaccactgtactgttcttttggtcccaaaacccaattatcgtattttttaattttctttcctctagttttgggatttattgttttccgagataagataataatcctaaatcaaagagaaagaagaagttttacaaataatattttctgtttcaatgtaaacaaaatataagggttggttatatatccttatatttgactatgatatttttacttatcgaaattatggaaacaatatttattggaagagtaatagaaagaagaatatgacatatatataactttctgccggatttttctcttttgctttgtattgaaggtttcatgatttttttatttcttagctaaaaataataataatattcaactaaaatatccttacaaattttctaaagaacaaaaaaaaaaaaaaaagaagaagaggagtattccataaacgggacggggtcaagatgacatgttgacatgaacgctagcgtttttaggagatgtacagatgggacacgtgtgcacactggacccgcatactccacacaagcacaagtgtctgcacggtaacagcaacacacacgattcctcctccccacagtttctacacatcctcctcctcctcctctccgccttatcctgcgcctccctttctaatcctaccctgcgccttaccgtttcttcaccaccaccaccacagctgcttccgcagcacgactccgcatcgtcctcttcgttcatgtttttctctaatcctgcgccgcgtgatacgtccttaacctgcgccagaacatgctcgaggttggttcggaggtggttagccgtggcttcgttcgtctgagcaaggtctctccagatttggttctctatagaaagtgacttcactcgctcctcaagcgcgtggttaaccttgccgatcctctctctttcttcttctttgacacgaagccttttaaccagtccttgctctatcgcctccattatcgttctcgcttgtcttttcctcttctcttctatctcatatttcactctctccatctgatataactatgaacatcaaatcagtgacaattgataatacgatgcacattgcaacgaactctgccgttgatgcaaaacttacgtgaagggagacgaatcgatctatttcgtgttgttgttgattcatgtgagaggagatatcaatgtcttggccaagaaacgagaacagagttgttgtagttgttgtagtagcagcgttaacacatgatgatgatctcgggttctgaagaagaagatgatgataatttgatcttgaagaatctcttgagcgttttctcgttggtaaagggaaaaattcacagtcgagattagtagcaccatcggcgtagtaaccggcggtggtgggaatagtatcagagccgccgtacacatgaagaagaggaggcgttgctgttgttgttgttgatgtatggtttggaacggagaaaggtgaaacgacgccgtaaccggtttgattgttattgcagaaaccgccactagttggttccatagtgttattattcatcgttaattctctgcaaaaatacaaataagaaaagattcagttacgttgataaaatcacaaagaaaactccaaagattgtacagagagagcgttagatacctgttggagaagagttgaggaggagaaagaaagagatggtgagcatcgacggccattgaaggagaggtttagagagaagaagatgatgaaaatggtgggagaagaggaagttaaaaagaagatagaaaattagaaatgcatgcgtttcggtttttgtttttggtgctttgatgtgcgtgaaggatggctttgctttttttttctcttttcttttttatttggtgagggaagaccaaatcgaaacgaacctcaaccaaatggttgtttcctatttatacacatcgatgcgactaacgtgaagagagattttatttttagggacaaacaaatagtattaattacccattttttggaattttcatatctttaatttgttcaaaggtaaatctatttttatttacatactggaaattttttaattaacttaccatgtttcttatggtttgatatatctttgattttttgcctatatttatctttttggtaaattttctcatttgctttacacactttctcaaagtcaatcataaatatatgaattcacttttttttggtaattttgttgcctaatgctttgaattgcaatccttgtttgattgtagtatcggttattgtggtgattttgaaacacacaaatattttcagttattattacaaaattttgaagtggtaacttgtatcgaaattggcggaaaagttattgaatcgcttcttttgtaatctggtcatactattaggagtaacgctcggattcggtttttttcttttaacttcaccgtaccaattaaatggtgttagaacagttagactgtgaatttaccgccattacaggggtagtttaggacattcatcaccgtaaaaagatagaagttaattttgttttgacgatatatgcaatgagaatatgacacgtgtaaaaagttccggaagagtcctacgcattgccatgtaagcattccagcgtggcgaacacttttccttgggacccacatactgtcttttgtacggaccgttaaaatgggtaaaatcttacttttttcctttttttgtaacactgtttttactactatttcgtacgagtttggcgccatgtggtgccacgtggtgaaacatcctggctacttctgtttgaccctttcttggaccttttttttttcttctaataaccaaaaaaagataaactatttctaacaaatttagtagaaaccatttatttcagtaaataaacaatgttgataattttattatttcctgataaaattcaattgtttttcaaattatactcaattttcataaataaataaagaacaatactatggaaaataaaagataaagataaagttttgttcttataaactggataaattggattggctccattatcctcgaattgaatctaaacaaaataaactaaaagttgaagtatccatcctgagatgtataaaattaagagaaccaagaggtgaagaaagaaagatggagacatgttcttattgaagatgatataagatagaaagtaacacacaagaattaattcctactttaatttatgtctcttttactctatttttttccttcttctttacatatttttggtgctttgttatattttctttcctacacaataaaaagtgaaaacattatgcctttgtcctctaaaagcttttaagtttccaccatcttaatttgtgttacaaagtccaattaaaaaaaaagtagactttgtaaagtaaaagagtggccatgatgcacaacttaaatacgtgtttggtttctttcaaatttcaatattgatctccattcgaatttgttatatattatacgagacgaccaacattaaggaggtttatttcaacacattaacgagacattaagtaataggtgcctgttacatttgatcatatgtactattaaaaatatatgatgtctttgtcttaccattaaaaaaaaaatgaaatcttgaattgtggtttcgtctttgattgaagagcaagtgacattgcaccttgactttgttgtatggtatccttttcttttctctttgaataactttggttctcactttctttctttttcttctcttcttatttgattcaacttaaagttggtgttggtgttattcatgtgatatcaacatttcaaaagaaaagaagaaactactacaaccattgtaagaatcttaaagggtgccttacctagaaacttcatctttccttaaaggaaccactataatttaatttgttgtaaagaaaaggtttcatgcattttgaactatatattgatttatctttcggttcatatacataattattcgtgtatcaaagtttttgataatagtgactttaattatgcttttgttccaacatcatatcacacacctagatcttacaacaattcaaaagaggcttcactggatgtgtaaagcgtcccattaaagacatgtgtttcattaattgttggggcttactagtgcatacatatcacatgtactttggtccatacatgagaagctcgtgacctaacggatacatctttggatctaacatcttaatcggaaggtaaaaaaaataactaactaatatcgaaagtaattaagagttgtgatctaaaaacatgtacattgatgaactcttctttcaaaatccgagaccgtaaaattactcagtccatacattcattatgactttggaacatttcgtgacaacttttacattggatgtattcatgtaatatcgttttcaaacttgaagaagttcccatcgagttactcaaatcataaatgggatctcaattatcggatataaatgacaatagttaggtgtgatttatattggaaactatctagggaagataggtagatgcataagaataagataaaaggagttaggtttgagaggtcccgattgaattaaagatgtgttgggccatcactctttcttgctcttcaaaaaataccttacttagccgtatcatcgaaacttaactttcattataacaaaaacttccaagattttatttattttatatactttaaaaatcgttgccccattaggagacaagagaagaggttctgcaaaagactttaacttggtgtcatgtgtggttgtgcttatggacagtctgtggtcccttcactatttttataatttgaaaaaaaaaaagaaaaaaaaaaagaaccaatgtgtagattgcatgattcccactactgctttcacaatctcatcttctgctaaaatgaataatgatcccacctccacttttaattcgttcagacaaaatacgaaatatatatatttttattataattataaatgtatatatgaatacgaggagagttatatgtactgacttgttaccatcagatcatgaaccacatttactccaagcaaacagacaaaagacaaaggtggtggtggtggtggtggttgttgttgttgtcgttgtcagatcactgattcactttcaccaccaaatcaagaattggttaatcagtttgaatcaaaagtatagattagacagcaggttattgtgttgttcttaaaagtaacttacacatatccatcactacaggagccctacttcaagtccctacctttgactagaccgatcagtcacattcgtacgatctaagcagagtaaatgcgagcatgagtctcatatggtcacttcacactttctttatcaggtcttgcgaggtggcggtagttgctactgctgctactgttgctgctgctccttttcattcctctcaaaggcctacgcgtagcaaaatcccacaaggtgattcttttcgctctttaatcagatttgaaagcaaaacattgataggaaattttctagtttggtggaatgatcatccacgttattgtatcttgcgtttgatcgcaaacttatgaactagtagatccaagataacaatgacaacacgattttaaaatgcgtttctatattaggcactgataaaagttgtgatatcagactggaaaacaccaattgcaaaaagatatctagtcaaaagacaaggcctaatgtgaaagtttcactgaatgcttttaagtttcaacaaagaagcatagcagatgaaggggttaaactcaatgttcctacactttactaaaccgggaccttctttttagatccccatgtgttcacacagtaaaatagcttgaccataaaacactatgagaagtatagtgattgtagaacagtcttactggtttgaactgtggctccttgatatcttcctaggagcctattagttgacactagctagaacgtcaacacataacacaacaagggcatctctttatttctttagctgaaaaggggtctgcaacaagccataacttatggggccttggggaactagagtaggaagatgaccttctacgctgccagttaaacatcttcccctgttcagaaccaaagaggagattacagttttaagttttaactataactgagtatgattacaatggacaaacactactcggtaaggagctacaatagcagaatttacatactagatcttggcaattcgataccaaaggccattaagtcatagttgactaaagtttattggagctggtagaccatacgtttctaaatcaaaataacacaaagcaggatcttggatcatacttatgaactaggagtctaatatgtaccgtagtagctgtgcaatcacaacagataatcaaatctaacactgacaaatatacaaaggtttaaccattacctgcggggtgatatcgaccttgaacgcgaacgagcatgctattgcctacaaattggttatcggccacgtctgcggtctgcggattggataccttcttcttggaagggacctgcatgtgtgcattcaagaaataatccatcaaatgaaaactaatacaatgtaggcagaacatctataaaattgaaacactaatgcattgagttgcatacactataaataaattgatctcatcctctaattactacaatgcagctctttaaacacaaatttatcgtcacctaagaggagaacgtcttagagcaggactgccacggatccttcgagggtaaccctccagctgacagataaaaggtgagacagtgaactgaaatggtattgaacctcagacgaggaaactgaaaccgttttggaggagaacggccgctagaagaggacactggcctgcgtatgggtgatccaccactcataggcagaggtgattatcatatttctcaatgtcagtaccaacattatcagattttaaagcatctccctttggatcacttgaaacatacaccatccatgtacagctgtggtttctcagcatcagctatttttgccttgaattcaacatatgcatctcctcttgaaagattagcctgttaatgtcaatcgaaattatgagtaaagtacttaggaaacaaatctgcaaaccagccaagagcaattgataagaaacttacagctcgatctatcgcaagttgaacatgaatgatttcaccaaaatcgcctgcacataaggaaaaaaggaacatcactgaaattggatttaagcgatataacaacattcgagcattgatttgacaatttaaatgtgtaattgtaatgagtccacttcgtataagataaccaaattaccaaatccaatctctaattaatcaaattggagaagaataagaagaagacgacgatgatcttgaactggagcgggagcgtgagcgggaaatagaccacgaaagactcgaatcttcgccatggccagattcagattctagcgcgcttgtaaggttaaccccagacccaaccctaacggctacctgtcgatttacacacaaacacacacgagtccgcacgtgacaagtcatgggttgggtaagttaactataatgaacgacaaataaataattaaacttactaaagcaaattatagtttgacaaaaatagtcttaattttcagattattagttggatatgcatagtttattcaacttttctcttaatatttttattacatgattttttttatttttggagatttatcagttttttttgttttaataatagtttttagataatttggaaaagcaatgatctctgcatcatcaatcataaaaattaaaaaaataaggcctcgtcgctatatcttctctctagggttcgctgttgctttttcatcttcttcttctccttctctgtttctctgctttcgtcacgaaagggcgatatgtattgtttctcagtaggaagctcgttactctgattcgattcgattctcaatcctttcatcaaaccgttttgggacttcggattttcatattaaggtagcgtatccgcttagggatccaattttctccgagaattgtctccttctacaatctgattctcctcgatttttccagttttcaaagcagtcaattagggtttgtagactaattcggatttggagacggtagcggttatggacgcttttggaatcgggagtagtttaaatcaagctcccgtaactcaggatcttaagaaatttggagataattctacaggtttgttcttcttttttctcggatttgttttgtttctgctcttttgaattcggcgtcttgttctctgttagattgaatctggatctagttggttcttgttcttcaactgtttaggagtatataaaacttgaattgcctcttagttgattcgttagaccttggtcttcgttagattttatttactttcattgtcttgtactcccacgaagaagattagggaagacttagttgctaatttaaatcgtgaaatgagaaaccatattatgcctgttgagattctctccgattgagcaatttccggaagaatgtttcaggtttagatcaaacttgcatcagagtcttatagtttcatctcttgtttgggcttgtctaactgaaggtttcttttgtgcaggtaacacaatgtttgatgcatctcaatatgccttttttgggaacgatgttgtcgaggaggttgagctgggtggattggaagaagaagatgagattttgtctttcactggaatagcagaagacttttcatttgataaggaagaggttattctcaccttatttctcttagctaccatctttgtagggaaccagatcagctttatttttggaagggatgaagctttttcttcggttttatatcttaggttcatatactggagtgactgacaatccctccccaatatttgcaggttggagattctagacttctgtctgacgttgatgatcttgctagtactttttcaaaggttagctagctttaatacgcgttagaagtgatcacacttgcatcctatacttctgttttctttctcattatattttcaaaatggtaagattgctttgaagaagcttgtgactgaggatttttatctttgcttttacagttgaatagggaacctgatgtgtatagtaatacggggccaatcactgataggcgatcaagtcagagtgagttcctatttgccctaatgttgtcatcaaatccttgtgaaagaatacttgatcaatttatttctgtgtattgcattgatttaatatttcatgtactgtctgtaaaacttcgcatcatagctttacttacttctgtgtatttatgtatgtcaaatctgtgtctgtcagtttacttttaacgttatgatttagagtgagctgttttaactccattctccttatccatatgtttcaacgatctgccctggtttcttatacattcccatggtttttcatctatcttgcaagcaaagctttagtttgtggtttaacatttcaatggtttctctcagattctttagctgctgagtggacccatggggaagagttaccaaattggtacggccggcaaatactggactctgatgccattaaagatgacaaggtgtggtcagcacagccattttcatctctggaccgtgttgagcagagaatccctgacagaacaaaattgtatccagaaccacaacgtcaactgcatcaagaccataatcaacaacagttttccagcgaaccaattcttgtcccgaagtcatcttttgtttcataccctcctccaggcagcatatcaccagatcagcgtttaggacaccctaatataccatatcaatctggtgggcctcaaatgggatcgccaaacttttctccttttccaaatttgcagcctcagttgcctagcatgcatcatggatcaccgcagcatactggaaacaggcctcagtttcgtcctgctcttcctctgaataatctccctccagctcaatggatgaatcgtcaaaatatgcatcctggggatagttccgggatcatgaataatgcgatgctacaacagcctcctcatcaaaacggtttgatgcctccacagatgcagggctctcagaataggttaccacatccgatgcagcctcctctcgggcatatgccaggaatgcagcctcagttatttaattcccatctttctcgatcatcatcctctggaaattatgatggaatgcttgggtttggtgatctgagggaagtaagaccaggatcaggtcatgggaacagacagaatgtgcgttttccccaacaaggctttgatgctggcgttcagagaagatatccattccggtctaaatatatgtcagctggtgagatagagaatatactgagaatgcagcttgttgctacacacagcaatgatccttatgttgatgattactatcaccaagcctgtcttgctaagaaatctgcaggtgcaaaactgaagcatcatttctgtccaaatcatttgagggaccttcaacagcgtgcacggtcgaacaacgagccccatgcttttcttcaggttgaggctcttggtagggttcctttctcttcaatccgcaggcctcgtcctctgcttgaagtggaccctccaaattcagctaaatttggtaatgcagagcataaacctacggataagccccttgatcaagagccgatgcttgcagctagagtgtacattgaggatggtctttgtctcctccttgaagttgatgatatagatcgtttcttggagtttaaccaactccaggacggaggacaccagttgaaacaaagacgacaagcattgttgcagagccttgcggtttcacttcagctcggtgatcccctcgccaagaatgggcaaagccagtctcttgatgattttctctttctaagggttatctctcttccaaagggtcgaaagctacttataaggtatcttcagctaattttccctggcagcgacctaatgcggatagtttgcatggccattttccgtcatttaaggtcattgttcggagtcctttcatctgaccccgatatcatcaaaaccacaaataagcttgcaacagttatcaacttgtgcattcaaaacatggagttaggaccggtaagcacgtgtctagcagcggtgtcttgttcttctgagcaggcaccgctccgccccttaggcagtcctgttggagacggagcttccacagtattgaaatcaatactcgacagagcttccgagcttatccgggctaataatttcaacaacgcagggatagctctatggcgcgcttcctttaatgagttctttaatatgttgatgaggtactgcatcagcaaatacgatagcatcatgcagagtttgcaattgccaccgcattttgccactgagatatctgaagaagctgcaaaagccattgtccgcgaaatgccaatagagcttctacgttcaagtttcccacacattgatgagcagcaaaagaggatactgatggagtttttgaaacgatctatgctcggaagccagaaaaccgagccagtattaagttgataggatgaagattgaaacagtaaaatcaaagaaactgtatggtgaagtctgtatatgaaggcataaagatcacgcagataccgcgggaagaaaggtagagagaatcgattcaaactatttctatttgcatcagagagttaggattcttccttcaaatggacaatactggttttgtgtcttataggtaaaagcagtggagaagaagtttggtctctgtacagagaaaaaagtctttaggttttgcagaacttatgaagaggtttcaggcatttgtatttctgtcttttgtttagttgatctcattgtcgtttcgatatttgtttttgaaaccttgtttatgtttttgataaattctctttcctttttttttcttactctgttttaccaataaacattctgagttatgctttggtaatgattactcaatttgttcttcgtaccatcttctctcacaagctcgagcattcacgtttcggctaaaagagtggtgtacacgcgcatgtttggacgcgttgataacagaggcggaggaaaaaaggaaccaaacctttcggatctaaagaagaacacaagaatgaaaaataattagattgaatttgatttaggatcagagagtgggaaagtacataatgatccttttcttttctgggttgttcgtaaaacccaaaactttcatttcatctccttcctttttctgattgctgtccgattttaagccatgtcgactctactgaactcagtcttatccatggcgtcaccggaatcatcgccgagaaaagccgtaggttttgtttcccacatcccttctggtttccttcatttctcctccgtcagtaaaggtgttgctagggttttagcttcgacccagataacattatcccctaaagactccgcctttaccattactggatccagttggaaacccgatttggattccgggtcgttttctgatgacccgagaagcgacgagccgaatttgagcgatagtttctctcatctagaaagtttagtcacgggagggcataaacccaatgtagctcattctactcagctcttgtacgatctctgcaaagccaatagattgaagaaagccattcgtgtgattgagcttatggttagctccgggattatacccgatgcatctgcttacacgtatttggttaatcagctttgtaaaagaggtaacgttggttatgcgatgcagcttgttgagaaaatggaagatcatggttatccttctaataccgttacttacaatgccttggttcgaggtctttgtatgcttggtagcttaaatcaaagcttacagtttgttgagaggttgatgcagaaaggcttagctccaaatgctttcacttattctttcttgcttgaagcagcttataaagaacgaggaaccgacgaagctgtgaagctcttagatgagatcattgtgaaaggcggtgaacccaatttggttagctataatgtgctgttgactggtttctgtaaagaagggagaacagacgatgccatggcgctgtttagggaattacctgcaaaagggtttaaggcaaatgttgtgagctataacattttgttgaggtgtttgtgctgtgatgggaggtgggaggaagcgaattcgctcttggctgagatggacggtggagatcgagctccttcagttgttacctataacatattgatcaattcgttagcttttcatggaagaacagagcaggcactgcaggttttaaaggagatgagcaaaggaaatcatcagtttagagtcactgccacgagctataatccggtgatcgcccgtctgtgcaaggaaggaaaagttgatcttgttgtgaaatgtctagacgagatgatataccggcgttgtaaaccaaacgaaggaacgtacaatgcaataggttcgttatgcgagcataacagcaaggtgcaggaagcgttttacataatacagagcttaagcaacaagcagaaatgctgcacgcatgatttctacaaaagcgtaatcacgagtctctgcaggaaaggtaacacctttgcagcgttccagctcttgtacgagatgactaggtgcgggtttgatcccgatgcgcacacctactcggctttgatcagagggctgtgtctggaagggatgtttacaggagccatggaggttttgtcgataatggaagagagtgagaattgtaaacctacagtggataactttaacgccatgatcctagggttgtgcaagataaggaggacagatttggcaatggaggtgtttgagatgatggttgagaagaagagaatgccgaatgagacaacatatgcgatactcgttgaagggatagctcatgaggatgaattggagctggctaaagaagttcttgatgagctacgattgcgtaaggttataggacagaacgcagtagataggattgtaatgcagttcaatttagattgatgggtaggaggcgaagataacgaacaccatgaggcttttttcttttctataaaacttttagtatacagtattttttcactgtttgtatcatttttatggagacgatgattcatgtaatcttcaggtttagaacaacagatcagagatcaataagaatcaagtaacacacacacattgtgcctaacatcttaaagatccgattgaaacaaatggagacaatgtgtaaattctagcagcgaataggtgtagacgatgaagtaaagtctgaaactttctttttgattaaaatcttaaacaagtctgaaacataaaaggaagcttatagtaagaacaatgtttgcaagagagaaagggagagaagcaagaaacagagtcgcattgtcttcaaaggcaaatttacttagaacgctgtctcatctttcgtctcttcctcttaagcctcctcatacgcttcttcttccactgcaaaagaaaaacaaaaaccattcactaaacccaaactaggatcatattgtatggatcagaattggcttctactcacccaaaaaaaaaaaaaaaagaggcaatgatcaaccataaaatttacatagtaggagagatcaagatagtgaaattgaaatcgtaaattcaacaataacccaaaacttgattaaaatcccaacattctcttccatcaagtacaaatcacacataaaatgatatgatcaatattaggagagaccaacattgtgagatataaaactcaactgttacaaaccagagtatctcatttcataccaaatcttccagaaaacagagctcttatatcaaatcccaaatttaacaataaccgaacttttgatgaaaatcccaacattctctttcggcaagagcaaaaccatgagtagaaatcacaatcctaatcaataaatttcaatatcctacaggtcgtgctacactaaaccaaggtttcaatctcactcgactgattctataaacagcaattcacaaaattcccaatatacttaaagatcaacacacaacatttttgataaaacctacagaagcatagctaaagttgtagataaaaaactgaccttggctctcatcttgtcgctctgaatcgaatcggagaaatgaaggcgtcgttaaacatatatacacacacacacatttgtagaaaagccctaaaatatctgaatcggaaatacattaacttctcagggctatttgcgtcattatccacacaaggctctttttcctcttgaagaaaaccttaaaaaaccaacaaactttaggagagcctcgccgggaaatggagcagctatcagactcggaccaccgcgattctgctgatgcaactactagctcatgtcaatccaccaccgcagaagatggtcaatgcggcggcggcggagaagcaatggctcgaggcttatcagcgatgctcgagtccgtcattaaagactttgactctaaagctcttgacacgctcaatagccaagatgaactctccggttctctcgatcgccttgtccaaggtacaatttaacctcttcccgagattcgtatttaacttaattggtgaaatcaatcgattcacaagcttcgtctccgtatttgttaattagattacgcacaaatcaatccaattgatccgattaagtttcttaaccattatattgccattggtctaacaaaattgcttaagaattgattcttgtgaaatttttagattggatagtgttttgttttttcacacaacaaaatttgaatgtgatggaaacacagagctagatcaattactggaaaacgctccattgccattcattgtacaacacgcatcgagaatttccagcgtcaaacaaagagtttcatctctgaatcttgttcttaaatctgtccaacgacgtatcgataacatcgatcacatgctctctgccaacaccacgcaaggttataaatgcttttatcaaaaccaaatccaaaattttattagttttgggaatttgtgaactcactacttcgtcatctatatatagtgcattattatctcactttgttttcactgtaacacagagaaagcatcctcggaaactacatgatgacgaaacacttactcactctctgttactctgtcactctcatcttcggatttgggagcaaacccaaagaggtgagtgtttttgtacaagcgcaagtgttttctcatattgttgtgttattgggcttttaagtgggcttttattggatcagttcgtttctagtttagaatacccaagtttcatttttttatttagattgttttattataatagataagtaattgttattttgtatcgttgcaagctctaattcgatgaaccacatggtccatcaatcaatcatgtagaacagaattttcaagtgaatatgtcgggtcgttttattttattttatttcgttttggttgcattgttgccttgttggtaataggctttacaaaaattaatatctaataatcataaaatcttgtcacgtgggtctacgacaaaatcgataggaggatgcccgtatataacagagtcacgtgtcttctgcgctgggtcacgtgattgaatgcctatataattggatctcgtaggcttttagtttttagatgtcctagtgctctctctgtagactacaagcttttcataaggaggagactacatgggccacaactttctttagttgatcgataattactatcttccttctataaagaaccatgtttttttcattattatgattaaactttctatttatgtgaacgatgatgatgggtgtgacttgtaagggtgttaatagttaatgatgatgcagaagaaaagaggtaaattaaaactatggaagaccgagcctctgaccaaatatctaattggtccgtttagtgggtacatccatacaaacacaaaaacctaagccccatttcgggaactcttctaaagtatgtcttaaacccacaaaactagcttacttttgctcttttattcgctgcttttacaaatcatgagctgcaaagtaatgactagtaagtatcatagatgttactttcaagactatatacacttttttttttctcaaaatggaatttgattagaaagcctgtaccacaaatgctgttagggtattttaagtaagtgagtggaggagaaaggggaccaaagagagaagtacaacaggagggatagagacaggtgaaagaagcttagggggtcttgtacttgtacaatctctattgctggtccaatctatcattttttaatacgacttaatagtagtctttgaacagtttggtacctttcacgtaccattatgataataaggtcgtgaaatcctgacacttaaacatgtgatgattcaaaccgaagaccaccaatagctccaacattaatggttaaacgaaccttccttgattaacaaaacaacaaccaacgaataaataaaccgcaaaaaaaaagaaaaaaaaaaaactcaaaataaagaaagaaagagaaaagtgtggtaaagtctctgaagactgcatcatttccgaaacacagaaaacgacaaaataaactatataataaaaagatacattaaaaataaaatcacatgaaagagacagcttagataagcttcaacgtggggagagcgcaaatacacgcagaagaagagcatatgatagagagcaaaagaatctgtttcctatgttctgacccacgcgcatccctttagcgcgtctacctcactctctctatgtgtctctctcaacccaagcacaagcaaaaacacacaatttaggagtctccatttccaattttgtgtctctatctatgtcaatgaaccctagaattacacttcaccaatggcagattctttatttacacacccaggacaattctaataccttataaaaaaaaagctctgttaaaaataagatttgttgtaaacaaaccaaaaaacagaatgattactactagagtactagctagctactgttgaatcaatacagtgttgttgttaccattgatggttccttcatttataatagtcgggttagattcgatccgtggagttacggcctctactgatgtgacacgacgctctattattgttgttgttccctgttctattgttctgcgacgaagatgaagatgacgaggaagagaaaaactgaccaaagactactgaaccacctctgattgagcaaacgggaacgttcaaaactggagtaaccctaacgtttgagctatacgatctctccattcctctgtgtctatacccgcttgttccaccattgaagctactcggactgcttgagcttcgttctagattctggaacacgattttacctgaagagtttagtcttggactgtctacagagactcctctgttcattatggctgatgtttctccaccggaacgtcgcatcggactgcgtccaactcttcctcctccggttcctgatgttgaatggttcactaacctcattctcggtggatttgggtttaggctacgagccggagcaaatggattcgcagtgagattgtggttgaggttaatgatgtggttttggttaggtctctctgcatcgagagagagtcttggaagatcttcgtggtcatggccagaggaggaagaggagagagacatacgagaagaggatatagagacagattcggaatcggaatctttgaggagaggaagactcatgagtaacgaagcatctgaagaggacgacgaggacctggagctccgatgcaagaactgtttcaacgacgaagttgacgatctcggattcgtcgtcgtcgtcgtcgcagtcgacgcggatttgctgctattctgagagaatcgtttgagtcctaacaagtccctccatctacttgaacaccgtggcgcctttggagaaaacgagcaattatcgccacccccggagatctcaatctccacgacttccatcctcctgcatttcccgccgatctccgtcgtctgttgttgttgctgcttcgtcacgagtttaccgtcggagaaaagctcatcggctgggagcattccgactggatcctcctctaacctaaactcgaaatcaccagctccgactgctgtttcctccttcggaatctccgatgcgacggatccagaactccgaccaccgtcgtcacggctgaaagaagctcgtggattgaaacatccgtaagtaggaaaatcctgagaaacagtaacattgttgacgcaaacagaagccatcaccggcgttcatgcaacaaacttatcgccgtcgggagaaaatcaacggccagatccaaacgagagagagagagaagaaagagagaggtttatggatgagtgacaatggtttgtttggagcgttgtgagtttgttttggagagtaggggccacgaatgccatccacagttattataaacgacccaggtggcgcgtgcttctcaccgcactagtgggggcattcacggtatttgttctgttggagccaatggcggagcctctcggatcaacggctaattcacagattagtaactttttaattaacttaattgtctttctttaatggaaactattattatctaactctggaatattccaaaaagtttaccttataaatttgggagacaaaacctttaaaaatatttgttcatgaatcatactaatacagaaggaaaaaagttggaggttggtaatcattaatgattaatatataggtcacgtgatataaggggttattttgattatcaataaataaggtcatcgaacagctagcgataagctgtgttgatcaagagtatggataagcggccacgggatgataagcgggaaaagtgactattcgctgagaatttatgtgttttgatcggagaaattagacaactcgtaatctcaaaagttttcattaagataacagcattcatttctatggttttgagatcaatctgatttcaaaagacaatcttctacactgtctttaatgtcctttcgagttagggattgctatctctgtatgtataatcaagtggtgcagtgcgtgtgtgtttgtctctctttatctggtgttgtatccattttaggatggactgtaggctaaatctgaattgaatcaatgtccttttgtttgcagatataatccattgcacatgcacacatcaccagttgtttttccttgttgtatcaagcacatgatacttaaagggaataacatgaaaggtacatagtttgtctcatcactttctcagtttccgattcatgtatctttcattcgttcctcttttgatgtagccaatttcaatgctctattgatttgcattatcatccaacttttacaaaaaaaataaggatgagttgagagtacaatgaagttgtgccgatccaaaggaactagtcatgaaatgatgatggtgaatagctaaatgattcattgttgttgcatgtacaaatgatcccaacaacgttattaataagtttataactgcaggattgtgaaaatcttaataagcatcaaaatctattaggctcatagtatagtagcaaagcttgttgtttaagagtaagtttcaaaattatgctggaatatagtttgaataacttcattggcatgtggttttcagagtgaagaagaatgatggagtagtttcggagaagatggaggacttttggggttgcattgtcatggaatatgattcaagcaattgcaggagatgatcaaaagtctttgagctttggtccttgcttcaccaagaacaagactttttttagttttcttcaaaagcttagcaaaagtcaaaaacctaagctgattttgtgtgtttttaatctcatattcattgcatattttttgttatggatggaatattttagttagctgataatattaaccaaatataataattattttaaatatcgaaaattatatgaggttcttgttgttgttgttggtcttttcgactttctgcttaaacccagaaaaatggattcacagctagtcttgtctctgaagctgaatccaagcttcactcctctttctcctctcttccctttcactccatgttcttctttttcgccgtcgctccggttttcttcttgctactcccgccgcctctattctccggttaccgtctacgccgcgaagaaactctcccacaaaatcagttctgaattcgatgacagaatcaacggcgctctctctcccgacgctgattcccgcttcctcgaccgcgtaagttcttcttaatccctctctctttcattcactgtacctgtgtctctcatagctcattttttaggtctcaattcattggaattagacttggaatcgttttaagctgaaattctgaacgtattgcaaggctactcacattttactacattggctcgaaaattatgtctcaaatttctgagctttagttacgggtcactcacagatggttatatccatctgcgtctaatcatatttgtgtcttcatttcgagtatggcttgtcttgtttgaccagtgtacattattagctggagcactatatggtagtagtctatgtatcaaagaacgaattttgacaagtttcatctctcattgagctgtttcttgcgcttcttttggtcaccggttactttgttctgagtcttgtcttgtctgaattctttctctcataaagaaaaggattttcatttctctcattaagcttggaggtgagttctttgtctcactaacttttgttttcttggtttgtttgcagcaaaaggctttagaggcagctatgaatgacattaacagttcatttggtaaaggaagtgtaacaagattggggagtgctggtggagcattagtgtgagaatctcttcttcatgattattctctttgtagatagttgttctttattcgttccactcttcaagggcgtttgtagtggaacaagtttcttcatgattattttctctgtagatagttgttctttattcgttccactcttcaagagcgtttgtagtggaacaagtccaataccatggcactacacatcttgattccaccatgtgatatttatttttttgtaaaaataattgtgtatgtttgtattgcagggagaccttttcgagtggtattttgactcttgatcttgctttaggtggaggcctaccaaagggtcgggtagtcgaagtatgaacttgctttaaaacaaactccagaatttttgatcatataaaattggcaactgtggtctcaccgatttgaactttgatattgcagatatatggaccagaaagtagtggcaagaccacgctagcactccatgctattgctgaagtgcaggtatctttcttgtcaactactaagattagatgatccgaatctttacatcatcacggtatgttcctgaaatatagtttactgactgtgcagaagcttggaggcaatgcaatgcttgttgatgcagagcatgcctttgatccagcgtattctaaagcattaggtgttgatgtagaaaatttgatagtgtgccagccagataatggcgagatggctttagaaagtaatccaacattcttaaatctcgtcttatgatagtaattgtcatgtaaagtgtgtgcctgtgaaactaatatgttgttattattactcaccacagctgcagaccgtatgtgtcgctcaggtgcggttgaccttatatgtgttgattctgtttcagcacttactccacgagctgagattgaagtatgatactttctcttttgcacatctactttctttattgtatgaatcacctgaggttaatttgtttcctctcccgtttcgtgcgtagggtgagattggaatgcagcaaatgggtttgcaagctcgtcttatgagtcaagctcttcgtaaaatgtcaggaaacgcctctaaagctgggtgtactcttattttcctaaaccaaataagatacaaggtaaaaattatgactaaacactcacctttgatgtattccattttgaagagtttaattttgtatgtaagcatgttgtgtccttgaactgacagtgttttctcttatgctattaagattggtgtgtactatgggaatccagaggtgactagcggaggaattgcgttaaagttcttcgcgtcggtccgtctagaaattcgttctgctgggaagatcaaatctgtaaggagaaaagttctattagttttgtacttatttatgtgtggttttgttctttgaaagctgaactcatttctcaactccttacttatttaaagagcaaaggggatgaagatattggtcttcgggctcgtgtaagagtgcagaagagcaaggttagtatcaaggcaaaacatgttcttataccatgtcacattattttagatataaaagtgattttgtctatcccttttctatttgcaggtttcaagaccgtataagcaagcagagtttgagattatgtttggggaaggagtcagtaaactggtacgcatccgtggctgaacaatctctaacaatgcataaacgtttttccttacattttaactaaaaacctaaatttgtagggatgcgttcttgattgtgctgaaattatggaagttgtggtcaagaaaggttcctggtacagctacgaagaccaaaggtttggattctacattgaaaactcataattcctgaagacttttgattatgttatagaagtgggtacagagtatgagatatggttgtgttttgggtctctgttttcaggctcgggcaaggaagagagaaagcactgcagcacttaagggaaaaccctgctcttcaagacgaaattgagaaggtttgcttcctctattcttaatcttaacccatctctgaagattgcaaaaatccatccttttaacaagaacgtaattttttttgcatcaattcgtcctccttacgttggcaatggtgttgcagaaagtgagattgttgatgttagatggagaagttcatcgatcaactcctttgatgagcagcagctcttcctcggcttcacatcgcgaagaagaagaagaagactcgcttgacgatttccaatgacataacacttaagcttgagactttcggatctatggatgtacaacacttgattttctctcatcatgttcacctcttgtttcaagtttcatcaattaaaaaaaaacactcatatggttcagtcttaaatccgaaaccattcttgtgcatggaaatcataaaggataggaagatgaatatatatacaaacactagaagtcttataaattcaaagtatgtctgagttttacaacattagagagaaagagaacaacacagaaacatttatagaaacatgattacacatgcgctaacaactttaagatttactgagccaaagcacttgtgttgtacacaagaagagcacctccggcaagaattccggcgagagttaccgcccaaattgccaatccggtgactcctcccttgtacacgtcaccactcgctgaccactcgttctcgttgtaaataggactgcaacccaaacattaaaaatcaatcatctactacgtaatccatggttctttcttatctacaaaaaatgttatggaggatgataattctaattcacctgtatccatcgacgttagctccatacttgtcgacgtacttgtaaacaccgtatccctgcgattatacgtcattgtttagagaacccaccaaattattattaaaaaggatattaaacaacaccgttttcagttactacaaaccttgccctttctgccggaggcgtcgacgccgtccctcaagtccatgctgccgttaattcctacacacacatcgattaacggaaataagctatacatgaacggtaacgtgtatatgttgtaaaagtctgtgtaataataatataaacgaaccgaagggcttgtcggtcttgatcttcttgacgccactggcgacaattttgaaggagggacgagctcttgtgagcgacggtaatcctctagccgccgtcttctccaccgtgaaaccagctggtttcaatgtcaccgaagatagcatcactgaagcagccattatttttctcacaagatgatcaaactattcttctctcgatctcttctcaccctaatgttcatgttgtgtggcttcaaatacgagggagagaagatccggtaagtgattgtggttatgacacgtggctaatgttgtgtggctttggtctggatatcttccttactaacgttatcttcaactggttaagcagatccgtcagatcagttttttcttcatttcgtaatgccacgtaggagatgaaaaaaacaaatgccacgtaggatattcaatactttttatttttcatttgtgacccctacaagttattttattttatttttgagaaaacccctacaagttttagtttacttaaaacaaccccactagtttgtcgtaaactcgcaatgtcttccacgttgtgaattttgccaagcgttgaaatgaaccgcaaattcgtacaccgatcagcgtttagatactgcgtctataattgctcgctcgctgcgtctgtagtgttgacactagtagatgatattatttttcttttcttgattaatcaatgtctaatgctactcaaattatggcttctccataactggaaacatcaacaaacttgaccattgtctaatgcaagttctaatcatatttactagtaacaaataaatctgtatataatacatgattgtatcgtacacaaggatttggtcaatgttttctatgcttattctattattcttctactcaagtcattaagatatgatattaatacaaattaaagtcgtttaaattaataactagtggttgatcagtcgatatattcgttacacgtctcagtcgtgatgagaaacaaaactaatataattaaattgagagtgagtaaggttacaagctatcgatttcatagattcagtctaaatattacccaccacaattttaataaatcaaattaaatcccacgtctgcttctaatgttagtagtagaccccaaataacaaaacaaattattcttttttcatgagtaaggactaaggactatataagctagctgttataacttatgagtcaaatgacctttctgaaagaaaaaaaacacatatattgaaatcttctaatgcaaatatatgtacattttgcctattattaagtctgtttaattcagtctgtaatatatattttgactatatacaatgtggataagagaataattttgatacttaaaataaattacgcatctttgctgtattacttcacataatcccaaaaccacaagcacgatgatttgtatacagataacagaacatgcttaactatataatgtcaaatgaaaacaaacaatcttttccaaaacaactttagaatcagaaaaaaaaacacatgctcaaaagtcacaactaaatcgatatatcatataatgccaaatgaagaattgaacagtaataattgtataaacttgtcgaacagcaattttttaaagagtcggttcggttaaatacttaaatccattgcttagaattcaacatttacagaactgaaccggtccggttttgactttatggtatagtaggaccagccgcaggtgatttcacactcttggaagtaaagtgggacccagaaaaaattagactactccagtaagtaagtaaggtcatttaacaacgactaataacgctaattaattagccaaaaacaatgctaattaataatgattaacgacttaattatactgttgccttcttctcaatggattatatcttgttgtcttcttctctctctctatatacgcgaaactttgtcgtctctctctcctcgaagaactttttgaaagtttgtctttctcttttagggtttctcaagctttaatcttacagtgtccccctctccaatcgactttaactaaagaagcccattttcttacttttgtttaccactctctctatttctctctccggggaactacttgtcggtggtggtgaaatctccgacgaagcattctattcgccggaaaattactatgatttttactggatccgatcaaagatcggtttttaaaagtgggagcttgatgggtaatttagggaatgtctttgaatgaagcaaagactggttttgctaataaaggggaaagaaaagattccttttttctgttgttgttgtttcagatattacggagctttgctttgcctttttttctaatctgttgtttttggggaaacttgcatgtgaagggatttgcgttgaacgaatcagcgtgaccggattttcttcttgcaacactgtgttgttgttgttgttgttgtatttgtttatcttctctctgaagtttatgcggcaaatctgttgaattaagttaccgaaacgtggtggggttttctatgtgaattcttatcgaagtcattcatggatgagaagcagctagtttcgtcgagagatgagtctctttggttatgttctcacccctgtcgatctcggtttctgtctctgtgagttaactcgaggttgagctaagctagggattgaagttgttggattttagcgatggaggatattgggttggttaagcaaggttggaaatggatgcaatctcagaaacatatgtgctccgatgcttgttctgcgatgcgatgctttggggagatgataggagggcttgtggagcgtcactggccattggtgtgtagtggatgtgggaagctattaggattgcttcagttgtcagttctttattggaaagactgcatttttaggggtttccattgcagcgccaaattgggttcagctgctttgcttctgataatgtggagttgcttccttagcttgacttccttatcttgcttgctctatgttctccttagtatggtaataatgtcttttgattttccccttttcctgtaatctctatttctggatttgagatctatcaatagaagtgtattccactcaccaaactgatagtgaaacttatctaaggattgaaattcagaaaggcgattattcttgatctagatgctattcctcactaattgttttaagtctacattagattggagatttggtttattgagttgaggttcacctgaatttactattgcagggagctgctgcagctgttgttctgaacttgggttgcactcctgggctctttatcgtaggactatttggaattttgattttatggatgtatgcaaacttttggatcactggaacattgtttatagtcggaggtaagttttgattttttccctgatcagttctgttcttatgctcttccactgttacaatacagccactttagattagtttgttggctgggttgagtctttccggttattggtcaatgagtatttttatgcatgatctcgactatttacatggtattgatttctctatttttgtttgattcaggctatttattctccttaaatcatgctcgcgtggtggttcttgtggcgggcttatatgcgatgtattgtgtcaaagtcagacttggatggcttggtcttttcctctcaataaatcttgctttcttgtccaacgatatattaaattgtcttcttcaatggtgtgacaatctaagtgaaaaaccacaacacgaggaaccaaagaaaccgaaagaaacaatcatagaagaagactattcaagggaatttgagtatccttcagttcctgtcgaagatgaaaccgagacaaagattcacgagaataagtcttctgctaaaccaactgcgccttctactgttgttaataccgtaaaggaaatttctagtgttaaaatagtcaaaatagaagagtcaagttcagctgatgaaatgaagagaatactgaatagtttgaatcattatgaagcattgggggtccctcggcataaaaagatcgatgctgcggtgcttaagaaagagtataggaagaaggtttctcctcttttccaatgctgagtaggtggttaatgaaatctctctgaatgttaatgaagtgtgttcaatatgttctaggcaatgttggttcatcctgataaaaatatggggagtccattggcaagtgaatcattcaagaaacttcaaagtgcttacgaggtagtcgaattacttataatcttgaatttgtatattttgaagttcttggtattttgatatatagacatgtaatggttgtattatctttttcaggttctatctgatttcgtaaagaagagagattacgatgagcaactacgaaaagaagaatctaggactaggagtgtttgtcagacatctcatgcttcttcgcatcaggtttagttaaagtcttttagcttctctgtaatatcttttggcgtgtggtctcatgttccatacattattcctattttgataagcagagtggtcctgattatcgatcagatgagtcaaggcggatacactgtacaaaatgtggtaattcacacatatggatatgtaccaataggacaaaagcaaaggcaagatggtgccaggtgatgaatccaaccaactcagaaacagttaaagaatattgttcttgcattttcgttatttcaaacctctcttacagataatctaatttgttaaatgtaggattgtggccaatatcatcaagcaaaagatggagatggatgggtcgaactcaaagggacattacccttcgagagagcacataaggtataaaaaagcttctttctcgccttgtcaaatgttataatgaatttggttttgcctcagtatcctcagctcaatcactttctttttcatgtccattaagattgaaataccgcgtgcttttgtttgcgcggagagcaaaatatttgacgtctcagaatgggccatttgtcaggtcagttctcttaccggttcctctgcggattacttaaatgcgaagatgacttgagatacattaacatgttttgattggattaaatagggaatggcttgtagaccaaacacgcatagaccaagctttcatgtgaacatggttgggttagaaaagacaacacagagatcaaactcaagtaggttcccatgggatctagatgtggagatgatggatgaggacgaagaagagtttgagctatggcttcaacaagctcttgcttcaggtctcttctgcgaaacctcaaaacgtagaaaaagctggagccctttcaagttgggccagatgaaaagcaagaaacagtggcgaagaacttccacttgattcaaatttgatcgaaaccataaacaaaattttcatatagctcaccacggtgaatccaaagccttgaagatcataatttttttaggggagtctttctctgtaaatagtatctgtcgattgttcttccaaaagaaaaaaaaaagaatctttggatttttcattgtggtaaactaaagaagctgtttttcttttttctttttctgaatcaatgtgtagatttaaaggtggttcatttgataagaagaagcttaaaaaagaaatgttaatggttactaaatttataaagtttgaatttttaataattctgtcccttttaaacatgagaaaataaaaattgagaaatcgaacccaaatttactaaagttttccctcctctgtatgttgctgacgaatcaaacacgtcgacctccaatattttttttttttaatttccttcaaagcttcgattttgaccttctgggttaatcacggaagagtttcctttttgggtagccgccgcaatttttcccggcagaggaaaaaaaacccctagaatctgggaaattgacgacgaagagggatataggtttggaaattttgggtatttaatttgatttttctttttctcgttccattcagattcaaaaacaaaaaccctaaccctaaaattcgtgttcgattaatttcgttgtctctgttttgttttctcttcgtgtaaacctttttttttcgagttttggcactctgagctatttgagtattacagattaagcttcgtcctgtcttattggagcaacatacatatatatatatatatatatagatatctatcatctgtatttataggcacacttgtaagtagaatagtgaggaagaaggtaatatgagtaggctctctttccggccacggccattagacattcataagaagcttcccattttaaaatcctttaaagactttgaagatgatgagactccaacttctaccactagaaattctcagttgctgcgtattgcttccgtagaagttgacaatgaggtgaatttccattttgttctaacttcgaaacattcgaccattttaaccattgttactatcaggtggctccagtgccaagtaagaaaccggcttcagaaataccaacacctcaatttgttattgtggatacatatgaaagggattattctccgacttttggtcagcctgcttcttatctacgtgcaagaggaggtaccaatttcctctgatttggttttgtattcattggcaatgaaggtggtttctttgttatgtgcagactataagtttgtctgtttgtttatgcagctcggtctgagcttggagaatttgtggagtatgatcttgacaatgaggatgaagactggctttatgagtttgataaggataagaaagaacttccacctgaaaagtaaagtaaccaatccaactatccttatagctcttcttcttcggatttatcatcatcatcagtatttttctgttatcttgtagctgcatcatgctgatattttaaacgttgaggcggattgggttattcagactctctgcgtcttttagttttgtactgttgctgaattagtttgctttattcactagaaattggattctgctaaaattgttaaaaccaaaactcttagtgaaatagataccgaaagaagaatcgttccatttgatgcacaacacaaatgtgttaaattgtttgatacaggcttgagatcatcatttttaaactagaggtgttggatcacaagacgcgggaaagagcaggagttattacacctactctcggctctccagttcctgtgcttttgcagtttgatgctgcttctgatgtatacctttacttttggattatatatctcttgttattataactctacactcattttagaagcagtacaaaacatttgaatgattagttctgattcttattgcaggtgctgcaagtactgtccattaattatggaaccttccaggcgatcttcaactactggaaagaaaaggtttgaaataaaacttatgtgattgttacaagttttctggatacagacgttatgttgcataggttaatgatcttattttacggggtgagataagacggtttaatagattatttgattcgtgaaacctatgcatagttcttgtgaatgacaaagcagttccacatatggagtacctttggctgataatacttatgcatatgtttcgttttctgttttttatgtgaacttagcgtaaaagatggcagaagcctatcttacggcgtttacaggtttgtattatttatttccatttgaaacgatcaaggcctatgttggaaaggcatcttacctcgattatttagttaatgttttgcttcattgtttggaacagcctcccccaccggttaatgacaccaatccctataatgtgtttaggccaagggagaaagttcacagactccacacaagaagggtaggctgtcttttttatgcatgtgcgacattttttctattaaaatccaactggagaaagaaaaatagtgataaggctttacttcatcttcagatgcagaggagagaaaacaatgtgcagtcatttgaaaagcttcgacaggtgagtgaggcacctgaacctttatggttctttaatttcctgaaatctgagcaatttacgtttacagtgccttcttttagtttctctctggacaacattgttttttctgcttgttaatgatctgttagtgattcttttatggttttctattggattctgaatacatgggatatgttattatcaggttagacgcaatctaggccaagcacagagcattctggaggctctcattaaggtgttctatatgacagttttagtgtttatcttaacaagcggattgcattctccaaagttgctaatttgatgttacccattccgtagagagaagagaagaagagggatgtcatggacagtgaggttagccttcagagaatccaactccaatacagggtacttacttctacttcctctaaaactctctgttttccgttttccgggtctaaaattgtttttttttttgcagcatgaaacagagctcttggaagatagcttggctatgcctggatttcaacccactacaacatcatacaaatttggctcaagcgatgatgaactgatggactctgatgatcacaccagtactcgtgtacgtacaagacctgcggttattcctagttctcgtttcaccaacttaaatctgaatgcatctcatcccggaggcatcaaacaagaagttagaagacgacagtcacagcatggatggcttcacagactggtaaaaccttctcttacaacacctaagctctctctagctactataatcaatcatttaagcaaacctgtaatgattttgttccttaggatcctaatgaaccggtaatgctattcacaaaaccgctggttcccgataaactggcagctgcagggattgttcctccaacaccggattcatcaccaggtcaacctccaagtcggtttcaggggaggattgggcgtggtggccgaattattttcgatagatggaatccgttgatgcaatctcacattaattgtggaaactcttattacattgctccaaatcaccggtctaccaacttcgattgagatattttcacaatcttgctttgtaaagaattttccatcaccaatggtgtatgcaataacgattctcagctaaataagttttagcactttgtaactaactggttattgtgtgtatttctgtttattttcggttaaggaaagaatctgtttaattcaaaatccggttctatcggcggtttggaaaaccaaaaactattgtaccagggaccaaattgtaataatatcttcaactcaaaggacaaaataggattttagggctctttattgattttaatcggaagttcaggtttgctcatcaatcgcagtgaagaaggaaggaacctaaatcggaatttgggtgctccatcaatggcttcgattttggctcgcaggtcactgaatactctccgtgctcgacatctcgtatgaatcttgttcgctcttgttatttcttcattttgtgtcctttagttagagttatttgaatgcctagaaatgggaatgtctcctggagttttgggagcttaagatgattctattcactctctgtgttttgttttgtgtcgacgagattctggattttatctagctgatcgatgaaatcatgtagggagatttgaatttgatcatggttcatcttaagggctttcgttttacttatggtttccttattctttttcgcatttaatttttgtgacgaaagccttttcgcaagtcaatttttttttgtttttttttgcgagctttaatcctttcattagcttgatatggtgtgtatgttctgaatacctctctgattacttctcgacattgataggttttgtcagggcaagctttacagggatctcatctgtctagactgcagtcccgtggtatatcttatggcagcaacaaaggtatattttctgctcttgtttggttttctttggtaaatcaggtttaattgtgaatctaccccttttccaacttgtattacgagattctgattcatatatgacttatggtttgcgtatgtaatattcagatgatgaagaagcagagcaactttctaaggaaatctccaaggactggaatactggtaatccatatgatctagacaattttactttttttctcctttcttcttttcttgtacgtctatcttccttggtgttttcctccccgagtattagtgattcctgatattctcaaatttgtagtctttgaacggagcataaacaccctgttcctcacagaaatggtccgcggtttgtcgctgaccctcaagtacttctttgatccaaaagttactgtgagtgatatcttttctagtcttccaaacttagattgaaagaaatctgtgttactgaagctctttcgtgtatgcagatcaattatccatttgagaagggtcctctgagccctcgcttccgtggtgaacatgctcttcgaagatatcctaccggggaagaacgctgcattgcctgcaaactctgtgaagctgtgagttttgagatcgatatgaatccttcatttaatttaacgttctctttgttctgatatggtactctgagtctatcaaattcatcttagtaattaggaaagctatttgagtatgagtaatatttactgtttagtctctagagttctgatgaaatggtcatattagctgacaatgatctatttagtgtgtataaaagttcaccacggattgtaattcttgtgagggatacttgtccttttcatcaggtatgtccagctcaagcaatcacaatagaggcagaagagagggaagatggaagccgcagaaccactaggtcatcatccctttagttctcatttatcaaccatctgctttctttattaccctttcatgatgatttgagctgtatcgtacaggtacgatatcgacatgacaaaatgcatctactgtggtttctgccaagaagcttgccccgttgatgcaatcgttgaaggacctaactttgaattcgcaaccgagacacacgaggtctgtttttcacattttctagaccctaataattttcgaggcatgcttattgaaatttttgttatattctctatgataggaacttctctatgacaaagagaagcttcttgagaatggagatcgatgggagacagagattgctgagaatctgaggtcggagagtctctaccgctgaaccattctacaacagtctctgcttcattcaacttgtttttcccggggaaacattttcgttgcttctgtttgaaaataaagacgagatcatatgcgtgtgaaaactcttttgtaatccagattttgtgctgtgtaattgaattgtttgtaaccaacctgactttgattttcggttcatgagttccggttattaggtgttttcggttcggagaaagagcatttaatttggtcaaagactgaaaacagataagtcttaagctacaagggtatatctgtacattaagaaatatttgatcggacggacaagatcatgtcttttttttttttacggcggacggacaggatcatatgcttatagtttatcctaatctgtccgatctaaacataatgcttgtcgattttttcatttatttgccttttggttgcgccaattatcgtattcagacagcaaaattaatattttaatgtgtattttttgttgagttactattttagaaaaacaacgaatccctagaaaggaaagaaaaaaaaaaacaaaatccccaaatcgagcgagtccaaagaaaaatcccaaattcgacgaacctacaagcccagaacatcccccgatttgggaaaacctgaattcattcgcttttgatttgccatcttctttctgggatttgtctactgcttgatcctaatttctgacctcgcttttggtttgagttcacacgtgccgcatcggctgttcaccggctttgtttcattgtgcagactccaatcatcgtacaatctgtagcaaccggttggtctccgtcaaatttctccactttgttgccaaattttactcctttttgtatcaattcaaagattgggggtgaatttttagggtttatcattttgttcatttttggtaactattttggggtttaattacttctttagttgatactatgattgatactatctcccaattaatatgagatcaaattgtgacaatttcagttctctgattacaccaagtttttttagcaggacattctctaaggtgctaaatcaggagatgaaatttggatactgtgacttctggaggagaggaaagttatgcagtgtttgttactgttaattaccagaagaactaggacaaggcgacggagactgaagaggtagctatgaatgttcaggctcacatgtcggggcaggtttcaaaccaagggactatgtcccagcaaaatgggaactcccaaatgcagaatttagttggtggtggttcagctcctgctactggtgctggtttaggaccttcacgcgtttctcccgttgacaatgacatcttgaaacttcggcaggctatgcgaatcaggatgtaagcctttgcttttctcaagcttttgactttggtgtcttcccaccattttgcagttatatttccttgctcttgttatacggctatttattttggattggattcaatatctccagtttatcgccaatcaaatccgtgtatttctcttctttcttttcagtttcaatatcttacagcaaaagcaaccatctccagctgatgaagcatcaaaggctaaatatatggatgttgctagacgcttagaggaggggctgtttaaaattgctaacacaaaggtatttatttaatatacttaaggaaaggataggcacgtatttggcatttaaaattttgccactagatccagcttgttggctaatgtcctaacttgaaatttcttgttaacgtgctacacttccattttgaatcgcaggaagattacgtgaacccgtcaacccttgaacctcggctggcaagtctaatcaaaggcaggcagttaaataactacaatcagcgacacgctaattcttcttcggttggaacaatgatacccactccaggattacaacacagtggtgggaatccaaatttgatgattacttcctcaggtgatgctacaatggctggaagtaataacatcacaactagtgctatgaacactggaaacctgctaaattctggtggcatgcttggaggttctttcactacaacttatataaaatatgggcataaaattttctgcgcatattttttctgaacacctttacttctctttgcaggtaacctgtctaatggataccaacattcatcgagtaactttggtcttgggtctggagggaacatgtcatccatgagctcccagagaaataccggccagatgatgcctacccctggatttgtcaacagtagtactaataacaacagcaataatggccagtcttacttgagtgttgaagcttccaacaatagtggtggattttctactgctcccatgatggtacctcagactcagcaacagcaactgaggcaggatattggtggccaaaatagtcgtatgctgcaaaaccatggaagtcaaatgggtgttggccttagacctggaatgcaacaaaaattgtctaatgtgtctaacagctccataaatggtggtgttggaatgaatgcaaaaagcgtagattcaggtacatcctacaccaatcctatcagaaattcacagcaggcttatgataatcttcagcgttcaggaatgcagggtaaagtctttatttcccatccctaaattgtagtttctaacctcttgttgttgtgcgtattcatcagaatattttaattgttatgttattttaccgtttcaggtgatggatatggcacaaacaactctgacccattcggatcgggaaatttgtatggtgctgtaacatctgttgggatgatgacaaatactcagaatgccaatacagcaagtttccaggctgtgtctagaactagctcttctttggtaagcaatccatggaattcactttgcatgcagcaaagtgcaccagtgaaacatcaatctgagaataccgatttgtaatcatctttcgtaccttttttgcagtcacatcaacagcagcagtttcagcaacagcctaatcggtttcagcaacaacctaatcaatttcaccaacagcagcagcagtttcttcatcaacagcaattgaagcagcaaagccagcagcaacagagatttataagtcacgatgcttttgggcaaaataatgtggcttctgatatggttactcacgttaaacatgaacctggaatggagaaccctagcgagtctatccactcccaaactcctgagcaatttcagctttctcagtttcagaatcaataccagaacaatgcagaagaccgtcatgcaggttctcagattctccctgtcacaagtcagagtgatatgtgcacatcagttcctcaaaatagccaacagatacagcagatgttgcacccgcatagtatggcttcagactctgtcaacggttttagcaacctctctgttggagtgaaaacagaatctgggatgcgtggtcactggcaatctcagtcacaggaacatactcaaatgtctaatagtatgtcgaacgaacggcacattcaggaggatttccgacaaagaatgtctggaacggatgaagctcagcccaataatatgtctggaggctcaattataggtcaaaatcgtgtctcgactacatcagaatcccttaatccccaaaatcctactgctaccacttgtagaaatggaaatggcaaccgggatccgagattcaaaaatcaacagaaatggctcctctttctacgccatgctcgccactgcaaagcgcctgaagggaagtgtcctgatcgaaattgtgttacggttcaaaagctctggaaacacatggacagttgtgctgcacctcaatgttcatatcctcgttgcctccccacaaagacattgattaatcatcatcgaagttgtaaggaacctaactgccctgtctgtattcctgtgaaggcctacctacagcaacaggcaaatgcacggtcccttgctcgattaaaaaatgaaaccgatgcagccaggtcagtgaatggtggaggaatatcaagtgacgctgtacagacctctgctggagcaaaatcttgtacttcgcctggtgctgatatttcaggtcatttgcaaccatcattaaaacggttgaaggtggagcagtcttctcaacctgtggatgttgagacagaaagttgtaagagctcagttgtttccgtaacagaagcacaatcatctcagtacgctgaaagaaaagatcataagcacagtgatgtacgtgcaccttcaaaatattttgaagtgaaagctgaggtttctgacttttctgtccagacacgacccggattcaaagatacaaaaattggaattgctgaaaatattcccaagcaaagacctgtcagtcaacctgataaacaagatttatctgatgtttcacctatgcaagagactaccaaagtggagaaagaacctgaatcacttaagaaagaaaatctggcagagtctactgaacatacatcaaaatctggaaaaccagagataaagggtgtttcattaactgaattgttcactcctgaacaagtgagagaacatatccgtggtctccgtcagtgggttgggcaggtttgtggtttctgtaacttttgaggtttacacaataatgtgattaattactagtattcgctttatatgcggcttgtttgattagttttccctttttacatgtactagatgactcatctgcagtatgaggcttgattgagctgttccgttaaacacatttttccatattttatctaaatagatatttgattaatgattgtccttcatgtgcttgcagagtaaagccaaagcagaaaagaatcaggcaatggagcattcaatgagtgagaattcctgccaactatgtgcagtggagaagcttacctttgagccaccacctatttattgtaccccttgtggtgctcgcatcaagagaaatgctatgtactacaccgtaggagctggtgacactcgtcattacttttgtattccatgttataatgaatcccgcggcgacactatactcgctgaagggacccctatgcctaaggcaagactcgagaaaaagaaaaatgatgaagagactgaagaatgggtaaaagcctatccactctgtagacttattttgtgtttgtctcccgtctttgtatgtttttttagttcatgctatattttgtttctatgtatgatttttgcagtgggtccaatgtgataaatgtgaggcgtggcagcatcagatatgtgctttatttaatgggagaaggaatgacggagggcaggctgagtatacctgcccatattgctttatagcagaagtggagcaaagtaagaggaagcctttacctcagagtgctgttcttggagctaaagacttaccgcgaacaattctcagtgaccatatagagcagcggttgtttaagaggctgaagcaggaaagaacagagagagccagggctcaaggaaaaagttatgatgaggtaatttaatggtggagtttgttaacgtttatttctttcatttattttcacatctgcaagctctttatttttatttttctatttgtttgatctagtgattctttgttagaaacagtatattgaagctgactttgttttttctttgacttgatacgaacagattcccactgccgagtcccttgtgattagagttgtttcatctgttgacaagaagctggaagtcaaacctcgatttcttgaaatttttcgggaggatagttacccaacagaatttgcatacaagtccaaggtaagaatgatcaaggcgtattgttgttactgtatttactgcatatatgcgttatttttctggagttcctctcgtacaattatccttctcactcccatgccattttatttttccaggtagttctgttgtttcaaaagattgaaggcgtagaagtatgcttatttgggatgtacgtccaagaattcggttctgaatgcgcatttcccaatcaacgccgagtttatctctcgtatttggattctgtcaagtacttcagacccgaggttagatcttataacggagaagctctgcgtacttttgtttaccacgaaattctggtaagtcctggtcttctgaaaccttggtgtttaaccaatatctgtgctttttactttctacactgtatggaggatctaagagtataatctgatcctttttatagatcggctacctagaatactgcaagttgcgtggtttcacgagctgctacatatgggcttgtccgccgctgaagggcgaggattatatcttatattgtcatccagaaattcagaagacgccaaaatctgataaactacgagagtggtcagttcatttacctttttgggatgaacttcgtaaactttcatatgaaaaagtcatttacatcatccaactgcccacgttgttattcgcaggtacttagcaatgttgagaaaagcttcaaaggagggcattgttgcagaaactatcaatctatatgaccattttttcatgcaaactggtgaatgtagagctaaggttacagcagctaggctcccgtattttgacggtgactactggccaggtgcagcagaggatcttatataccaaatgagtcaagaagaagatggaagaaagggaaataagaaaggaatgctcaagaaaaccattactaaaagggctctaaaagcttctggtcagactgatctatctgggaatgcttccaaggatctgcttctaatgcatagagtaatattttctttctatgaatattgcttcctttttgtatatatttttttctcatttgttttgtttttcttgttaatcatattcacctgttttaccgattcccagctcggtgagaccattcacccgatgaaggaggactttatcatggtccacttgcagccttcttgcactcattgctgcatactgatggtatctggtaatcgttgggtctgcagccagtgcaaacacttccagatttgtgacaagtaagaattctttcgaggtctttttgctctttgattttataatcccttctttgttgtattgcacataagattatgtagaagtcccgagagatacatttattggatgggctatgtgtccttgttactgattaagttcctctgaatctaaaatgtcattcttctttttaggtgttacgaggctgagcagagacgtgaagacagggaaaggcatcctgttaattttaaggataagcatgcgttgtatccagtgagttgcattttcttgttgaggatagtgttctttagctttgtctatgatcagttttgtgaatattggtggtattgatatcgcaggttgagattatggatattcctgcagatacaagagacaaagatgaaatactcgaaagcgagtttttcgacactagacaagcatttctgagtctttgtcaagggaaccattatcagtatgatacattgaggcgggcaaaacattcgtccatgatggtcctttatcatctacataacccaaccgctcctgcctttgtcacgacctgcaatgcgtgtcatcttgacattgaaactggtcaaggctggcgctgtgaagtatgtccagactacgatgtgtgcaatgcctgtttcagtagagatggtggagttaatcatcctcacaagttgacgaatcatccatctttagctgatcaaaatgctcaaaacaaagaagcgaggcaattgcgagtcttgcaggtatacactatactgttcctttctaaaactgatggtgcttctctcttggtcctgaaatttgtatgcaaatagtaacattttttttttgttctcttcttttggttttgcagcttaggaaaatgctcgatcttctggtacatgcatcacaatgtcgttcggcacattgtcaatatccgaattgccggaaagtgaaagggctattccgacatggtatcaactgcaaagtacgtgcttcgggaggttgtgttctatgcaaaaaaatgtggtatctcctgcaactccatgctcgggcctgcaaggaatcagagtgccatgtacctcgttgcaggtaaacaaacctcatgaaattacatcaaccttacatttaagacgtgaaacatatttggtccatttgattttgtgttgatgatcattgtgaacatctctgtctctctgttcagggacctaaaggagcatctgagaagattacagcagcaatcagattcacggcgcagagcagctgtaatggaaatgatgagacaaagagctgcagaagtcgctgggggctcaggttaaaaaaaacttgtatatttagaaagatcaattcaaagttgcaaaaactttcatccttctctcgaaggtaacaccttttggaagaagaagaagaagagccagttagagagagacagattgtgaaattagcttagattggtatttaacagtcacgggtcagggattaacatgcgagctttaaaccaaggatgccactttccagaagaagaagaaagagagcaatgccagccttcttcacagatgacaagagtgttgagagattcaggtttgatggggtttggttggctgatcttctgattctatctatacatacacacacgcgcacacacacacttgcccacttctatttttggtaatttattgtatttttgtaaaattgacatttctgattcgggaatggcaagagtgtaacatatacagtacgttaacgtgtttttttttttttttgttttttttttgtgtaagcaaagtaagataagagagaatagagagtctttagattctctaccactctttttttttggtaatttgtattgatgaaatttgtattcacactttgaatcaataataatttagttctttgattagatttgtaaacgtgcatgttttatttgcagttagtgtgttactgtgattgagaagaaggtttagagagacgaatcttaatgccacgtaagcaggagattctgataagtatctaactgggcgtttggtggagtttgagaagtatctaaattccaagccaccagaaacggacacgtgtctaaacaaggatagagtgtagaacgagaaccacttagcttaagcaagacagagagtctgatgagaaaactgcacaagaaaatcagcaagagtaatgataatacactgtccttcgtcatctctctatcgcgcgaaattgttatacaacagaggtagtagtaaatctcatcagtgtcagtgtcagagtcgcttggtgactcgatctgcggctgttcgtatatccacggcgacgatcggggctatagccgcggcggttatgatggctgctgtgtccgtagcttcagcagagcttccaccgccgccgcaagatggagaaacgttatctaacgtaccgcaaacgctgtcaggggaagactgtaagaaacagaggatccaacgaccaaaatccaaaaacgcagagaaatgtacagtcaaatgcgtaaacacttgcattcgcagcggagacggagaaggaccgatcaatatcagaaggtatctctctctctctctctgtttctgtttatatctctctgaattcttcatgactgatattttgatctcttgtaaatgaaaggccattagtggtattcaagcaaggatttcgtagccgtaattactggtatccttctttctagattaaagggttcgttgctttctttattagcatggatcttaattatcggagctgtgacttgtaattgtagcttagtggaatgctcggatatatgcaatttgatcggagatggtgactatggtccctgaaacatgaaaagaaacagaggagaaggaaaaggaactgattcagaataattttgtagaatctgtttttttggaaagaagattcaaacacggtgatatttggtctcaatataaagaatacacaggtttcagagaattgcttggcagattgagggaatccaagtgactgtgtcttgtttcttcgtgacatgcggcaaaacacgttgttggcttacagttatttctaattatctcgttgaaaaatcaaggcccaatgggtggtaatatggcccaacggaaaactaatgggccgtacgcattatcgtaaaccagcttgttctgtttcctcaaattaataaatcagcgaaatgttggaaagtttcacctaattcactcctaagctctgttataaattctcttctagacagcatcttccaacaacccacaccacacaacattcttcattctctccgaaaacaacaaccaaatgggagaagcggcggagcaagcacgtggcttccacgtgaccaccaccaggaagcaagtcatcacggcggctcttcccctccaggaccactggctcccactctcgaacctcgacctcctccttcctcctctcaacgttcacgtttgcttttgctacaagaaaccacttcactttaccaacacagtggcttatgaaaccctcaagactgctttggcagagactctcgtctcctactacgcctttgccggcgagctcgtcaccaatcctaccggagaaccggagatcctctgcaacaaccgtggcgtagatttcgtggaagccggtgctgacgtggagctccgagagcttaacctgtatgatcctgatgaaagtattgccaagctagtccccatcaagaaacatggagtcatagcgatacaggtaacagtttcaacgatagttcactacaacaacatatatataactaggtttttgtttaattttgtgaacaggtgactcaactgaaatgtgggagcatagttgtaggctgcacatttgatcatcgtgtagcggacgcgtattccatgaacatgttcctcttatcgtgggccgagatctcacgatcagatgtaccaatctcttgtgtaccatcttttcgaagatctttgctaaacccacgacgaccattggtcatggatccatctatagaccagatttatatgcctgtcacgtccttgccccctccacaggaaaccaccaatccagaaaatctccttgctagccgtatctattacatcaaagcaaacgcattacaagagctccaaactctagccagcagttcgaagaacggtaaaaggacaaaacttgaatcattcagcgcgtttctatggaaactcgtggcagaacacgctgcaaaagatccagtcccgatcaagacctcgaaactcgggatcgttgtggatggaaggaggagacttatggagaaagaaaacaatacttacttcggaaacgttctctcagtcccatttggtgggcagagaatcgatgacttgatcagcaagccactatcttgggtgaccgaagaggttcacagattcttgaagaaatcagtgaccaaagaacatttcttgaatttgatcgattgggttgagacttgccgaccaacacctgcggtttcaagaatctacagcgtcggatccgacgatggacctgcgtttgtggtttcttccggaaggagttttccagtgaaccaagtggatttcgggtggggctcaccggttttcggatcttaccatttcccatggggaggcagcgccggatacgttatgccgatgcccagttcagtggacgacagagattggatggtttacttgcaccttacgaaaggacagttgaggttcattgaggaagaggcttctcatgtgcttaaacctattgacaatgattatctcaagatttgaaaaaaaaaacctaatctcttagttttcaattatgggtatataattcgtgtgtttaatttctccggctggtttttttttccttgttttccattttatgtgatattatgtttgcctcttgggacttcgtatttgaattcttgtattcgttacaagattatgcaaccgtacaatgtactatatatctgtcaatatttgaatcaaatttatctctctgatgtgtttgttggattactttactaacgttgctcaatctataatacatttattaatactggaattcttggttcttttgccaacaacatatatacattcaatatagatgatgacacaacaacaatacaaaatactattctatggatgatgaatcaattatatggaaatcacgttctcacactatatataatactgtcatgatacctcgactacacgcatttggtgtcattggaatgatcgatcgcgtgcactaccaaaattcgtgtagccgccaaagcagataaaaccaacctccattatattgacgagtattgaccatcaaaactttctttcacaagtttattaaaaaatactcgtcacttatccgtcaattagtgtttattgtagattcttctatttgctacttgcaatttacctatcgtacaaaactgcgtgatatacaatctgttcatatccaatatttatgaaataaatcatatatgtaaacattaattatgatatatgcattaataattgaatacttacaaaagttgtttgtgatgtatagtattgatcactatagtctatagatggtactagctaactagagcttggttcttgtgtggttgtaccatttagggtttagtcaagactactctgactgtaattgataacactgatagctatttatagtttaattatccaaaatttggttgttcatcttcctagttgttgtattttaccaaacaaatattaagcagatttaactactaaacctagacccacctctacgaatagaaatttaatgttttaactaaaataagtattgcttctttctatatactggtggtttctatatacacgtgtatactgcttttgaccttttgtcactaatcacttttttttttcttttctcgtcttgtcactaatcacttaatcactataaacaattcgtttccaaacgttcatgaaaagtgcagattatatatattatacctttttgcaaacatttataaattttaacatacgttatgaacaaaatatacgccaaggaactaaataaacatatacaaaaacatttccatcgtttttacgtaatttctattaaaaaaatcatatttcagaatactgtatatatataaataatcttataaaagagtttaaataattttatacataagtataagatgtgtataggtacatgtaaatgttaaatataaatactatagtatagtccactactgttaaagcttcaatgggtgtgtaataagtagccttgttatttgtcaacgtggaagaatttgtgtagtaaagtaaaaaactgtgtgtaaaaattttgttgtcgttggggaagattagaaatatgtggttttagtcaaagtcattcttaacaactaaatgtccttttttgtctctctctttttttcttttcttttttcaaaaccttattttgtcaaccaactaaatatcctttatagcatttattatcggaaaatattcatgtacttattaactaaaaatttaataaatttatttctcaaaaaatataatctaataaaccaaagtattgatcagacagaaactaaggcattaatcagaaacatatcaagtgtattccaaaggcttcgagtttttaagaatttttaggatcgctcacattaagcgcattaagcgtgtgacagggtttgtgtgggcttatatatgagagtacatattagcctaacactcagctaagcccaagtatctatatacttccacaatttccaaaaaaacaaaacaaatatttaataattggttaattgaattttttaaacacacgcattttcaccgtcattgcgcatctttcgttctccctcaaagatctaaaataaatcaaaattagtaaacaattgttcagcaaaagttaatggtcgtgaatggtcattcttgtccaaacctcaacaatgtctctatccctaaatccaatcacaatggcacattatctcaaaccctcgtcgtcttgtccgtgaagcaaaccaaaaagcacaacactaactttggaaacccattttctatctttcttgcaaatcaagatgacgcagaagctcgtacgccttgtgatcgtctctctggctattactgtcactttacttcaagcaaaaaccgataaccaagaaggtaaaaacatttacggattgaattattaaacgaacagttttgatagattaatcaaattaaccgatcaagatattaatcagacaagttttgacagtctccgcgttgaacgtaatgttcacgagcttaaattcgccgtcgaaactcaaaggttggaaagctaacggaggtgatccctgcgaagattcttgggaaggcgtcaaatgcaaaggctcttcggtcactgaattgtatataatcattaccctaatttaattacgagccatagtctcaaaaacttacttgtaccacaagtcatcttatattctttctttttttctctggcagacagttatcaggctttgagctaggtggatctcgcggttatctactaagcaacctcaaatctctcacaactttgtgagaatcctcatttaatagtctcgtttaaattagttaaacaagtaatcagaaaataacagttttggtttttgaatatggtgatagtacagtgatctcagcaaaaacaatctcaaaggaaacataccttatcaactcccacccaacattgccaatctgtaagttcatacatttgtttgtttttttaattacttattatgcaagaaacaaattgtaatctgctatttgatatagagacttttctgaaaacgaactcgatggaaacgtgccctactcgttatctcaaatgaaaaatctccaaagcatgtgagtgaaaacaaagaaattgattaagcatatctttgctgtgaattatggtttatgatcacttgttaatttatatatgtgaaatgcagtaatcttggacaaaacaagctcaatggagaactaccagatatgtttcagaaactgtccaaactcgaaactctgtaggtacaattcctttagttatgtacatttttaacagaaaatgtttgtaagaagtatcaaatttgagaccttacacacccaaatttatgtatgtagggacttttcgttgaataaactctctgggaaattacctcagagttttgctaatctcacaagcctcaaaaaactgtaaggaataagaaacaaatcattactttatagtatttttctacgaaggctaaattggaaactgtcttgttattgtgcaagacacttgcaggataatcgattcacaggcgacataaacgttctcaggaaccttgccatcgatgacttgtaagcagcaaaaaccatacttaggctgcgacacaattccgaaaactcaaaacattcatttgcttattatgtgattgcaggaacgtcgaagacaaccagtttgaaggatggatacctaatgagcttaaggacatagacagtttactgtaagagaaacgtttgcaataccagaaacagtttcagcatgaaaaaaaaaacagaggatattaaaagatttcccctgttttctctctgttttgcgtttaataaaggactggaggtaacgactggtcaactgaaactgctccaccaccaccaccgggtgttaaatatggccgaaaatcttcgggttcgaaagacggaggaggtataaccgccggaactggaatggtgatcgctggagcatgtttaggcgttcttgtgttgatcattgttttaattgcgctcgtttccaagaaaaaatcatctctctcacctcatttcatcgacgaagataacagtcatcacaccccaaagttcaaatctctcacctcgcatggatctgcgcaagagcttcgtgttgatttcggcaacgattacaaaggtatacgacacatttcaacctatcttgtttggcaagtaactgataatgatgagcttatttatggtagatgggaaatctggagattcgggtgatgaaaatatccataggataggatcaaagggactaaaacattatgtttcgtcgcgtgtgatgtctttcactgataccgaatttgcgaacaagctcaatgcaaaacgaaccacttcaactcgttccgctgtggaattcgagctctctgatttgcaaagcgcaacagccaatttctcacctggaaatctactaggggaaggctcaatcggacgtgtttacagagccaaatattccgacggacgtgtaagttacctaacgtgtttattaagtaacagaataatcacaatatattatcaattttctttctcactcagactttggcggttaagaagatcgattcaacgttgtttgattcgggtaaatcagaaggaataacgccgattgtaatgagcctctcaaagattaggcatcaaaatatagcagagctcgtaggctattgctcagagcaaggtcacaacatgttagtctacgaatacttcaggaatggctcactccatgagttccttcatttgtcagattgcttcagtaaacccttgacttggaacacaagagtcagaatcgccttgggaaccgctcgagccgttgagtatgttcttaaatcggaaataatgcaaacgcaaacgctctataaaaaaaaaaaaaagattcttttgtataataattttttattttgtgtaggtacctgcacgaggcatgttcaccttctgtgatgcataagaatatcaagtcttctaacattttgctagacgcagatctcaaccctcgtctctcagattacggcctctcaaaattctaccttgtgagcattaagttctctttaattttgtagaaatttggatttagttatgagaattaatatattatatggtgtgacagagaacgagtcaaaatctaggagaaggatacaatgcaccagaagccagggacccttctgcttatacaccaaagagtgacgtctacagctttggcgtcgtcatgttagagcttctcaccggtcgagttccatttgacgggtcagttccattttatagcaatagggttaacaattaggttgagctatcgattccgtgttaaatacatgtacttttttttctcctttaagaaaaattggtttttctgttggcttgtgatataaacagagagaagccaaggccggagagatcgttggtacggtgggcgacaccacaacttcacgacatagatgcattgtcgaatatagcggatccagctctgcacggactttacccaccaaaatcattgtcaagattcgccgacattatcgcattatgtgttcaggtggaaccggagttccgaccaccgatgtcagaagttgtggaggcgcttgtacggatggttcaacggtcaagtatgaagcttaaagatgatctttcatcgtcttatcgagcccacgacgattatgattactagagttaagaagaaagagtagtgacattatatatttataagacaagatatatagttaataattttcttgacacaaaacaagagaagactaaatcattatttattcattcaaatatttttgtgttcatcttttaatattcggtgtattccgtcgctggaaaaacattcatctcatttaaaaagaaaaaaattacataaataagtaaatgattaattaacgataaacacaacttttcggtattctgcgagtgcccataatgggaaggtgtttctgtatgtagcatagtgtagcatgcatgtattcatgaacgctcctactatttcctgtatatgcacacacaaaaaatatttaagcaagttcaaatcttgatcacagatcatactttcttatatatgttctagatcatgtctaaaaagaagtaacctgttgaggaaaatcgccgttttcaagttgtgaattgatgataagtttggcagcacgatgaagaggaatcaaatctctctcagcctatatgtgtgaatatatatacgaaagtgtaagcgagtatcggtttcgagaccaactcgtgtatttgaaattagaaaaaaaatgcaaatatagattaaagtgtttgaacctgtcccgtatgaattagagccatcatagcccatgatgtttgcacaaggtttgatctttctccttctgatggtatatatctctgcataaaaatcatgttaaaaaatgtgataacatttttcatgataagttagatgaattgattggacaaagattttgcatttatgtctcgacatacctgttcggagcatgataaatagctttcaccccaacctccatcatctctttgtgtcgtgagcaaaaagtggacaccattgcgcatagctaaacaatcgttgtaagtttcaccagctgctgctaggcctccaagagcaaaccaagtagcgtaaatgaagcaaacaccccaatttccgtacctatcaaatttctccaaataccttaaattgttagaatttttattaaatgtacatcaaaaaaaattttgtttacttttgcgcttattttaactttacatgttataattttgtatattttcaattacattagtagagttctgatcatttttttgtaagccaacacaaaaacatgagttatgtttgtaccatgaaccgtctggtgtttgattgtcttgtataaattgcacagctttttcgatggacctgttgatctctttcttcctgtgatctggatacaattttctaaatagatcaagtgcttgtataacagatgaggtgcattccacaaactcccgctcgaccatggtattagccatgaattctgtaggattgagcagctgaaacaccaattagagaaaggtttaaaacttgcgtgacgttaaatcaagtatgtggatgttgataataataaaataaaaatctacatcaaataaagaaaaaaataaattcttatgattttaagatttagcagcgtcttttgctcttaagagctagtttttgtagtgataactaatttaagagtttttagagtttagtttgtatataactcctaacaggtagattgtttttttttttttttacttttgagtatgcaaaaaaaaaaatgtaaaacacattttagttcttacttccaaccatttatatgcacgggatggctcccacgcattgacacctccatttccgctctacataaagagtggcagttttagtaacacaattagttttaaaaaaacttaacacaaaatttgatgaaaatcgtatgagtatatataacttcacctgtaaagacagcaagaggttaacagagtcatataattgttcatcatctattttctggccgacgatatcagctgacatcatggaaagcagcaggcaacactacacaactcaaataaatttataatatatggactgatttaaaacaaaaattcaagttaaaactccaatgttggacttgttttgctttagtgattggtttggtttacctttaaagcttcagctgtacaatctgaaacttgccatccatgatctcgatcagaaaatgtccatgctcctttcgaaatgtggcggtacatgctcctaaaatcacctgaagggttttctctaacctgccaaaattctttgattaatatatggaaaaaatattcagcttaattaagtaacataagattacaataacgaggacatatttaaacctgagatgcctttatgtaattatgtcctctctttagtgcatcatcagtttcatcagggagattacttgcaagcaaagcttgaatagcaaatccagtatcccacagttgacatccaaagctctatatgtaaacttaaaaatcttaacatgtttcttatacttgtgaaatagctagagatcttaatttcaatctattaatacctgcattttcattccatcttcagcgacccacatataatctggaattctagccagatgcttcttgaaataatctccattcggattttcaacccaacaagctagcatgcacagtacctatattgggaaaaaagtagcagttttaatttataaaaatgtacaatattaagagaatatatattaacatataattcttcttttattaaagggttcttaaaatggtttgccttttcaacacatccaatggttatgtaatggctattttcgtcttcatagtgtatgtgtttcatagtaagctgaagagctttttccctcacaagcttgttcaatggccaacgtgtaagtaaaggctccacaaagttttgaagagtgtcagataacaaatcttgaaccaaaggatgagcataatacatgtcttcctgcataaggaatggcagaatgtttgtggagttttcttccaagaaaaataaaatttcaagattgaaagtagtcaagcatacatacttttgcatatagacgtcgactttttttccaattgatttcttcataaggttccaagtaaagttcttcgcgcaagagtaaaataagaggtgtaattggaccaacaaacctcttcccatatagatacgacataggtatactaaccatccggctataacacaaaattttccctgtgtgttttcaaatttttttggagcaggacaaacattatttgaagagaaaaaacgaaacacaaatatagaatcagcagaacatagcaaacctggatgtattggaagaaaagaaggcagcatcaagagttctggtggcgtcggattagttccagaccaatcatagactccaagtatctagatatagaaaaccaactgatggtttatatatagaaccttaagcattcaacatctcccatttaagttaacaaaatatacatggctcaaaagattttaccgagagccaaaatttcccccaagaaggaataaagatcactccaccgcggtcaagaatccattgtctagctcgtttgcatgcgtcttgttcaggattttctccaagcatacgtaaacatatgtaattcaacacggtgcagaacataacactcttgctttcgatgtgtaatccccatccaccatcttcgttctgcaaaaagacaaaacatatataatctcatgtaagagtacattaattcgagattagtgaccttcacaactaaaagtatatatacctggtgacaatagatatgtcttagcatctctttgcgatgttcagcatcgaatacttcctccagatgtccggtaatgtacaaacaaaatatctatatataaaaataaaaaaaagtcgttcaaattccaccctagctctcgttttagtcttttgatttttgcgaaacaaattctttgttttggataaccaaaccaaaaagttcttggtgtccataatctcctcgtaaacatagtaagtctttctcttctttattccatatttgatatttccatgcaagtaataaagaaagcgccaaaaccttacctttgttcctaagaagattaattatctctctcgtagaaatataagatagagtatcgtcaaaaaggtatatagagagagatgaagaaacttacgagaggaggaaggaagaaaagcggaccggtgatttctcccggccaatggccgtcggaggcttgcaaagccgtgaagtaacgaacgcctcttcgtaatgcatttgtcgttgtttcatacgttatttcttctatgttagtagcttttagttgtggtatgccttgttcgaatttcttctctcttagaaactgtacatacaatcaaaccaaataaaataaacattggtagttgtaacaacaaaaaaggcgaagattagtataagatatttcatgaggaaaaaaagaactcacttgcattcgccacaatagatcactgcaacctttaacacgaaaacggttatccaagaaaccccggcgagcttcttcgacggcagctcgttcctccggtgagccggctttgtgatcaaacttccatgtttgacgtccgacgaagttattgctgctgaataaatgcggatcttctccatttccctttcctatcttcaacttccacataacgacgtacgatgaccctatagatagttatgatattctatcaagttgatttctgacactgatgaaacgtaaaggaaagagcagctggatagataaccactaattaaagaaggcatttgagaatacgtacctgaataaaaataaaaaaattgatcgactgcaagttagagaagtgtcggtgtgccaactaccttcgtccgatgagactagacataaagaagaaagccaacgtactaaaatataaacaaaaaaagtttcgcttatgtctcttggcacggctctgtttgtactgggtctatgtttgcctttgagaatgttaattcgatactttcgaagagtttcatgtacgtatgtttattaaaaaaaaaaaaaatgtttatatagagaatgaaacatatatataggcctgtatgtaaacaaagaaagaataggttgaagtacgtagtcacatgctttgcttaaaaacgaatggacaaaacttgcttgctagttgtcactagggtaacttaataaaattgattaatctgctgttgttattatcgtaataactaattaaattccaatttgaaattgttgattttgcatattggggggttttgttatattatacttccctttttttttaattgtcagtaatacaaaaaaatctccctttcaaactatgtgttattttttatttttttaaaacaccatttatttttaaaaaacgtgcggaatttccttttgtgaaagacaatttggaacctatatacttatattttacaaagaatctcgtgctcttgatgtttttgctaggcaatcggacattgttacacacttacactgcatggtaaaacgaatatagtgggaaactagagtttcaaaagcttaaaatgttgaaaaggtaagcgtcctattgtaagaaaatatcattaatacaaaattcgatttcaaccattattctataatagtgtaaaatttcatttagttttaagtattgtattgaatagacaaaaagtcacaaaaagtacaatatccctatttttttaacaaaagcgtaaaacaataaaacggaaaacacaagcaagtgctctttttatgacaggaattgttgttttgtgtaggcacttgcacgaggcatgttcaccgtctatggacaatgatgcataagaacatcaagtcttctaacattgtgctagacgaaattattgctactgaataaaagcggatcttttccatttccctttcttatcctctcatttgagaacacgtacctgaataaataaaaatcaataattggtcgattgcaagtcagagaagtgtcgctgtgctactgctaattgtgatgagattaggtagacgtagtcacatccaataattgctctaaatcgaatggaccaaaatttgctagctagtaagcatcatcaggataatcaaataagatatttttgtggtaattaattaagatagataaagataaggagaaagcaaagcaatgccttatagttatggtgagaagtaggaagcatgggattctacgaggaaaaagattagccagacgtacataccaagtcacatgtcataactaagataataaaataaaagtaattaatatctattgttgtttttctcgtaactaaattccaattagtaatcgatggttttacagcagagttttctctcgtataaaaatatctacatcatctcatccaaattgttgtggattcatcattaaatatttcaaatacttacctttttgtatttatgtatacagaatcaaataaaaataaattcatgtcatctttgattattcaactagatttttatttatacttgtgagcaataaacattagttattcatgaagcaatagatttgtctttttgtttgtttgttatggtagtagcactctatttgtgagtgttgttgtgctgtgtacaaaggctagtttggaatgaatttcatatgacacaaaaacgaaaagaatgatgacgtgtaaagactatatattagtagaagtttagatcagcaaatgtgtcagctgattctcaggaagctctatccgtgtatgtttcaactcttgattaattagaaatatactaatgaaaaaaaaaattctgtcttgggaaccactggagccatcgattatgttcttagatagacaaaaacacaaacgaaaacaaaacagtctttcattacctttcttgtgatcataactgttcaccgtctttaatgcaaaagaacatcaaatctcctgacattttgcttaacgcaaatctcaaccccagtctctcagattaagaacatcaagtctcctaataatattattttgtctttcatatctacagaattgtgtataatattattaaagaagagccaaatctcttttaaagattgactattaagaaagagctaaagatcttgatgagttgcgaaggcagctttccgatattccgcgagtgcccatagtgggaagatgtttctgtacgtagcatagtgtagcatgcatgtattcatgaacactcctaatatttcctgcaaagacacgacaataacaaagaataattaaactcattacatatacacatcaattttatatttactatcgttagaaacaagaaaagtgagttcaggtccatgacatcaatattcgatctgatttttattattacagagtatgaagtactaggcaatagaaaggtacgataaaggaggtaacattattctaaatctcaaaacttatgtatgcttcaggagatattcatatatcgatcgaaaaggggatgtttgaaacttacctgttgcggaaagtccccattttcaagttgtgaagtgatgataagtttcgcagcacggtgaagaggtgtaggatctctctcggcctgttgtatagatacagcagaggaaacgataggggtttcaagataatttcgttgtacttgaaataaatgcaagtccaagattgaaaatatttgaacctgtccggcatgaatcaaacccatcatagcccatgcggtttgcactaggtttgatctgttcccttctaatggtatgtatctctgcatacaaaccatattgagaagatttaaagtttctccaaaaacttaaggtgaaattgatacgctagaattttgtgttgatccataaactttacctgctcagggcatgacagatggctttcgccccaacctccatcttcttcctgtatcgcaagcaggaaatctacacctttgcgcacagccaggcaacttttgtaagttttaccagcggctgctaggccgctcagagcaaaccaagtagcgtagatgaaacagataccccagtttccatgcctaacattactcaaaaagaaactattaccttaagagaaaaaccatattcattaaacacgtcttaattatgttaaaggcataccatgaaccatcaggcgtttgtttgctttcaatgaattgcacccctttctcaatcgacttgatgatctcttttgtcctgtgatccggataaagttgtttgaacagtaccaaagcttgtataacagctgaggtacattctacatactcgcgttcagccataacacaagtaaagaaatctgtgggattgagcaactgcaacaccagttacaaaggttagacctgatcacctgaatggttatattcttaacgattttcaaatccgcaaaaaggacatcaaaaggtgtccttatgtgttgtaactcttacttccagccattcttgtgcacggacaggctcccatgcagtcaaacctcctttttcaccctacatcaaataaagttgtgttcgtgaatattaattagagacagagcttttaccaaaattagtcttatagatattatctcacctgcaacgatagcaagagattaacagaatcatataattgttcaggatctattttctggccaacgacctcagctggcatcatggagagcagcatgcaacactacaaaacacagaagtacaggttaatctggggcataactcttgtggaaactcttaactaattctgcttccacaactaatttgattaccttcaaagcttcagctgtacaatctgagacttgccatccatgatctcgatcggacagagtccaggctcctttggaaatatggcgatacatgctcttaaagtcacctgaagggttttctctaacctacaaagtgctttaatttagggaaaagaacacatgcaattgttccataaggcatttcaagatacaagactacaattaaacctgggattttttgatgaaactgtgtcctttcctgagtacatcatcagtttcgtcagaaaggtcacaagcaagtaaagcttgaatcgcaaaaactgtgtcccagagttgacttccaaagctctgcaaaaacttgaaatgcttaagaaaatttttcaactagcgtctacataaataattcatctatatatactagaacctgcattttcagtccgtcttcagcaacccacatgaagtccggaattctagcgagatgtttcttaaagtgatctccattaggattctcgatccagcaagcaagcatgcacagaacctgcattaacatttaggcatatatttgaaatttatgttgtcaagagaatacatgcacaatatttcaaaggttttgtcaacgtcttaccttctcaacacatccgatggtaatataatggctattttcgtcctcataatgtatgtgttccattgccactcgaagagccttttcccgtacaagtttttttaacggccaatttgtaaggataggctccacaaaattgtgaagagtgtcccataacaaatcttgaaccagaggatgaggataaatcatgtcttcctgaaagattaaaaatgatgtaatgcctgtggattttctcccataaaagagaaatttgcatactaaaattggttaaccatacttttgcacatagacggcgcgctttgttccaattgatttcctcataaggttgcaagtgcagttctttgcgcaatagcataataagaggtgtaagaggaccaacaaatcgtttcccatatagataagacatgggcatataaaccatccgggtataacacaaagtttttcctgtattttttttgcagcaagaggggacaacattaaaacaaaatctacaaacataaatgtatatagcagtttcaagttgatccatacagtataatctccaaaataagaaaagaacaaacctaagtgtattggaaagaaagaaggcagcaaccaaatctcgggaggcattgggttggttccagaccaatcatagattccgagtatctacaaacgaaaaatcgaatatcaatagtagtactaaaaacgtttcaacatcttagttatattaacatatggttcaaaatataataccgagagccaaatttttccccaagaaggaatataagtcacaccaccatggtcaagaatccattgcctggcccgtttgcaggcgttattgcgccctccattgggaccttctccgagcatacgcaagcatatgtaattcagtacggtgcagaacataacgctctttccctcaatatgtaaaccccatccaccgtcttcgttctgcaaattaagagacaaaaaaaacaaaactcatgtgaggatctctagagtctagtccaccactttaatattatccgagccaatcggtgaaagtacctggtggcaatagatatgccgaagcatctctttgcgatgttctgcatcaaatatcttctcgaggtgtcctgtgatatagaaacaaaatacctgcaggaaggacaattctcttcgtgattcttcttccttattactatataaatccctaattagaaccctaagagtattcgccggtagatatcaagtaagaatcgaaaggaaaacgaaaaagaaacataccaatggaggaaggaagaagagagttccggtgatttccgccggccagtggccatcggaggactgcaaagccgagtagaaagaaactgctctccgtaacgcatccgtcgcgtttttgtaagttatgccttcgccgtcgtcgatcttcaccggcgggatcacttgctcgaatttcgcctctttcaaaaactgtgcggttttacagtcaaatcatctcagaccaaaataaaaacattttcgcgttgaaaaaaaaatagaataaaaagagactatggctattgggtagttacatggcccattaaattttagggcccaaaaattaaaaagtttcattacgaattcgttcattggttggtttttttttttttctgaataggttgaataatttggttatcccaaagccataatatttttgtttatctgatttatctcctgttcaaatgacttacctaacgcgatctggctgagtgaaaatcaatactaaaagattggataaatttgtgattgtaaatttgtaattggattaaaatcaacaatatagccaatatagcaatctatttagattttaaggcatttttgtatataacaaataaattaacctcgctcgtgaattaaaaactcacttgcattcgccacaagagatcactgcaacctttaacacggggacggttgtctaaatagttccggcgagcatcttcgacggcggctcgttcctcaggtgtgccggctttgggatcaaactcccatgtttgacgtccgacgaagttgttgctgctgaacaagtaaggatcttctccatttccctctcctatcttcaacttccacataacgatggtcctagctatgtatagttacgtgtacatatatatactcaacgagtttagaatttcatagaaataatcaaatgatagtatattagagagtccagtttgtaaacaggcgtacggtatatatagataaaaaaaccatgtattaaaagatcccttatgttatgaatatgagatggagagagggtaagagagataagagagtgaccgagagaatacttgtgctgggtcgatgtttgttttgcgattgatgattatactttggggagtttcatgtacgtatgtttatatatatagaggtaggcctccatacagtatgacaattgaataagaataatttggggatattatatgtacagtatgtaagagcatcattatccatgagttcttaagaatatgaaaaaatttcttaaaatattatataaaataaaataagaatttaaaatataagaaatgactcttaaaagaggaaaatggttcttagataagagatatttgctacattctctcttcttgttaagagccccttaatatttaattattattttgtatatcaaaatgttaagaattttgtgtaaaaactcaccattaaggatggtctaagtatgtatagtttacgaacattaaagacaaagcttaaagttgttgacatgaaaattacactcttcaactctacgcagcttaattgtagttacaaagttttctctccttctcttgtttttaggtttttattttatttctcaataatgtcttattgcgataacatcgtattatttgcttttaggagtatatataaatgaactcagaagacttctcgaatttttgctcattatgataaacagatattagttcttattatctaatactagctagtttgtagttaggttccatataattaaataatcagtcccatatcacaatatcaaagtcatatatataatcaaactcatttaacaaatgaaatggtggtccacctgtttagttcatgcaacttaatagagaatatgtgtacttttaaaaacactttaatttgattttacttggggagagtgtagagaccactcaaataaacgccgtataaaaaagttagaaacgatacggtcgcacttaattaccacaccgcaagaagaaacgatacggtcgcacttaagagatcaaagctttttctgtggtacgcatcccatgttacacgtggccgtatgtataagcgtaaattgcgattgacaaattgagttagctctctttcactctcactacatatgtttttgtcaaattactatatttagatcataacgatcatgtgcgtcctacatttttatacgaacatttgtccactctgcatcaaatacggtgcacgattcgtttattgttaggtcgaccaccggtcatgattaaatgctgattgatacattttaattttggttcctttttataatggtataatgtgcagtaacagttgggattgaattacatacggttaaaaaacaagtggcgattatgaatgatttgttagtcgttcacaaaaacaacgacgattcattttttttgtcattatgtatagggatcccttgtgtgaattatcgccacttgttttttgatgaacatatattgatgaacacgtgaattatcgtgaaaagaaggctctgctattttgtcatctaatcccctagctactttcctcctataataaaatgatttcataaatattttacggttttagtttaacataaatttagtgagcttaacatgtttatatttaatatttatggccactcgatagaaacattagaaaagaaaagggaaattggtttaatacatcccaactagatcgtaaatttaaacttcataaattctaagtgtgtccaacgctcatattcacaaccggacatttgaaatccaccgtctacaaccaaacttatcctagggctttaaatacaccctttgtttcggatgacaatctaaacccctggtttttagctactacgctactctctagataaatgagataactcttcattgatactcacgtcacgtacaaatcactcccaattacaaatcaatttatcttcttttctcaactttaatataattgacgagttttttcctcgagtctgacaaaaaaaccaaaaaaaaaaggtttagtatttagggctggactcaaattatacaaacacttgcggaatatcgtatgggctttgggtgctaagtgaggcgacatgaagatattactggcaaatattcagtcacgaaccattttataaggttgactaacaaaagtatgcatgcaaactaccgttgaaatgtgacttcaaaacgaattatgtatgtatgtgtgtgcgtgtaaatgaattcaatttcacacacttctcttctttaattttctccacatatattacgtgcatctcaatgcacgatgcataaaatatgccatatctttagattattaaattaattaaggtctaaagaatgtggaagttgaagatagcaaatggaaacaaagaagagccctacttgttcagtaccaacaacttcctcggaagacagacatgggagtttgatccggacgccggcacagtggaggaactagctgccgtcgaagaagctcgtcggaaattttatgatgatcgttttcgtgttaaagctagcagcgatctcatatggcgtatgcaggtatttatctatttttctttactttttgtgcgtgtcaacatagtttatgaattaaacgtacagagtatgaagtgaagtgatgtctctctcgtgctagctaattaataattgttaccctgtctttatccagaattcaacaaaaaaaaaaatatgaagcttgaaaaaacagtaattcaagaaacaattttattcttgagcacctttatactatattttgggtattctgaaacaatttttaagcttcataaacaatttgttagtgtcaagtccaatttgtgcgatcctatttgttaaatatatatatatatatatatatatagactgttataagcttaaatatagactaattaataactccatgatgatgctagttttcagagaaaaagtttcataggatataatgtgtatttaaacgatgattaactaattaaaatgtttgttataaagttctgaaaataagtaattttttgttcgtccatggataattctacatatatacgagaatatctacaagtatcacaattttgaagctgaggaacatgtttccaatttacattgatattcagaaggaatgaaataacatcccatagtttttgtaatagcatgcataaagacgtatggtggaactggaactgggtaaagaacgtgattatgggttaggtccatatttttagttttttgctaacctttaaaaaggcaataaccgttaaccttttaatttgaaatcaagacagttggaaaataaaaaaataaaaaaatcaagacattcaaataataatgaacgatctttattttacacccgaattgtaaatttattataactgtaagggcctaaactgtaaataaatagacttaaagatttcaccggtcaaagtcacgagaacaagtcaaagtcaaacgttcaattacaacccataaccttcgacggtaacctcaccggcttactcgacgtcgccgggaataatcaccggtctcggcctccacgaagattctgcgacgttctgtgagaggcgagggtaaaaaccttctcgcttcacattcctactcgaagcctaatcgtgttccttcgactagattcgccggaatgaaacaagaaccctttatttcaatttcaaacggtgatttaacgcagatatcggaatttacggagcatagtgttgattatacacttggaatctgagtcattaataacttgtcttattgaaatcctggtgtttggttttggtcctatgatacagtttttaaaggagaagaaattcgagcaagttatacctccggcgaaggttgaagatgccaataatatcacgagcgaaatagctacaaatgcgttaaggaaaggggttaatttcttatcagcattgcaggccagtgatggccattggcctgctgaaaatgctggtcctttattcttccttcctccattggtatgtctctatctgctctaatgttctcatctctacaaggaactaagaacaaattagtgttttagatttgaaaaaagtaatctttgtaaaaaatgactgtacatagattctatccaagtttcagcagcaagtggcacagaggttattatccaatttccgatatttttgtttgtttgtaaaatacaggttttctgtctatacgtcactggacatctccatgagattttcactcaagaccatcgtcgagaggtccttagatacatctactgtcaccaggtatatcattagtagatcgcaaaacctaccacttatgctactttataaactcttttctttcaattttacttttgagatgtgtttatttcaagaatgaagatggtgggtggggattacacatagaaggaaacagcaccatgttctgcaccacactaaactacatttgcatgcgcatacttggagaaggtccaaatggaggaccaggaaacgcgtgcaaacgggccagggattggattcttgaccatggtggtgcaacatacataccttcttggggcaaaacttggctttcggtaaatatccggatgaaattttggtacaatcggcaaaataatattcagaagattgtttaaatattggttgaatgtttgtagatacttggtgtctttgattggtcaggaagcaaccccatgcctccagagttttggatcctaccttcctttcttccaatacatccaggtttcttttcttcacgtcttgaatatcttcatctttgcttcaataaactaagtagtgactagggtgtaacaatcaattaagacttgagctcttcgaattgcgtcgtcacttctaaattttagtctgaaaccatttaacgaaaatctgcagcgaaaatgtggtgttactgccggttggtttacatgccaatgtcttatctttacgggaagagattcgttggtccaataagtcctcttattctgcaactacgcgaagaaatttacttgcagccttatgcgaaaataaactggaatagagctcgccatctatgtgcaaaggtaagatcgatcattgttccttctttagatagatttttcaggaagataaattctcagaaaaccttctacgttcattctcaggaagatgcgtactgtcctcatccacaaattcaagatgttatatggaactgcctttacatcttcaccgaaccgtttcttgcatgttggccatttaacaagctgctaagggaaaaagctcttggggtggcaatgaaacacatacattatgaagacgaaaatagccgttatattaccattggatgtgttgaaaaggtaaaacgaatacagtccttatgcagaaaggctggagtactcagaatttatctttgaattaactaaaacttcagattctttttgaaggcattatgcatgcttgcgtgttgggttgaagaccctaacggaattcatttcaaaaagcatcttttgaggatttctgattacttgtggattgcagaagatgggatgaaaatgcaggtgtcaatgaaaattcggaatctatttgttatgtcacttaatggaaaatttcgtgtggcataaaaatttatgagtcatgtattttgcagagctttggaagtcaattatgggattcggggtttgccctccaagcgttagttgcaagtaatctcgtgaacgaaatcccagatgtactcaggagaggatatgactttttgaaaaattctcaggttcgatatcctctgcagtattattatttgtgactttaaattattagagaaagtaaagatgtcttacggagctgagagttcttaaggttagagagaacccttcgggtgactttacaaacatgtaccgtcacatatccaaagggtcgtggactttctctgatcgagatcatggatggcaagcttccgactgcacagccgaaagtttcaaggtgattagtcagaattcgattactataataagctggtcagctttccacctaattagcacacttatcttggtttgtagtgttgcctgttgctttcaatgataccacctgacattgttggcccgaaaatggatcccgaacagttatatgaggctgttactatcttactgtctctacaggtgacctttataccatatatagaacgcacttgctcaactttttgttataagaaatgtctgttcacttgctctggctgcagagtaaaaatggaggtgtaactgcttgggagcctgcccgtggacaagaatggttggaagtaagaaagaaatcccatcaagatatttgtatcacaacgtttatgaggcatgtgaaagaaattctcagaaacatcttgttacttttttcccatgtttcagttgctaaaccctactgaagtttttgctgacattgtggttgagcacgagtacaatgagtgtacttcatcagcgatccaagctttgattcttttcaagcaactatatccgaatcacaggacagaagagatcaacacttccatcaagaaagccgtgcaatacatagagagcatacaaatgcttgatggttcatggtattatataaattagcttttagatacagtgaaactgttcacaaagattttggttttaccaacaattcttggattgataggtacggaagctggggagtttgcttcacatacagtacatggtttggtctgggaggccttgcagctgctggaaagacatacaacaactgcttggctatgcgtaaaggcgttcatttccttctcacaactcaaaaagataatggaggttggggtgaaagctacttgtcatgtcctaaaaaggtaataatcattgcaatgtaagcgtcttttccccagttcccgcgagtcaagaaaaatatacttggtttggtgtgcagagatacattccaagtgaaggagagcggtcaaacttggtgcaaacctcttgggcaatgatgggtttacttcatgctggacaggtttataatatcgatatgctgagacttttacttcctcgctatatgaaagatcttattcaaagtatttaattgttccttttaatctcacactacaggccgagcgagatccgtctcctcttcaccgtgctgcaaagctcttaatcaactctcaactggagaatggcgattttcctcagcaggtacttttggaaacatgaaacaaagctaacacaaaaagctgctcatacaaaaaccttagagatgccctcacgatgaaccataacgactcaaattttatctggtccttttgctgcctaaaattttaactggtcctcgtgagttgatgctaaaaaaatgcataacgtttgaagagtcaatattgtatattttacaggagataactggagctttcatgaagaactgcttgttacactacgcagcatacagaaacatcttccccgtgtgggcactcgcagagtataggagacgagttcctttgccgtatgaaaaaccttcaacagagagaagaagttagatccatcagaacgtctcaaaactcacaggtcattgaccatgatgtaggatcattaagtcatgacctctattttgcaataagctattatttatatgaaggtggttgagtattcttactgaataagcaaactaatgatcgtgtatgaacatacacatctaatattatatgttcatatgtattatattcatgtattgtatcatgattcatgactatgtatgttctcaagtaatataaatgtattatattatatgtatgtagttaagtacgtatccaagattaagcaaaatcttttccccaacaagtactctcatttttgtcttttaattctctatcatcccagaagtaacatgttcttgtcggtgttttcttatcacatatttaccaaaaatctacccaccttatcttaacttaatatacttccacttatataatctaatgtatgcgtttaagaaatgaggtacgtagctcacatttttgtaatgtggaggttgaagataggagaagggaacggagatgatccctacttattcactactaacaacttcgccggacgacaaacatgggagtttgatcctgacggaggctcgccggaggaaagacactccgtcgttgaggctcgccggattttctacgacaatcgttttcatgttaaagcaagcagcgatctcttgtggcgcatgcaggtttgtattttgtttttctggtttgtaatttattccttggaacattttattagcaacgtgctattttagtaaaaaataacaatttttcaaagtaacacgaatgattttgagttttgactcctacaaatttcctcatttgatgaaaaataaaaaaaaatcataagctcacttttatgctgttcatttttgtaatgtactaaaatacatggaaaataccaaaataaacacaaaaagatacgtaattttgagaaactacgaacaaggccctaaaaaaaagtttatttacgaaattgacctgctattttaaaagtaccgaattttgcaacagtttctgagggagaaaaagtttgagcaacggatagctccggtgaaagttgaagactccgagaaggtaacctttgaaacggcgacgagtgcattacggagaggtattcatttcttctcggcgttgcaggccagcgacggtcactggccggcggaaaatgccggccctttgtttttccttccgccactggtaagtagttttttccggtgtcaattgtagaatcagagattaaagagtgcaattgcgtaataggtaaaagaataagataatttcaaatcgatcgacgaatgaaattggattagggatcagtgtgattttagttttcgtgtaagtgagaatgttgaaattgaaagagggaatttttaagtgaaagtctgaaactttgttgctccaaatccaatgcacactgtgtactgtgtaggtgttttgtctttacataacgggacatcttgatgaagtgttcacttcagaacatcgaaaagagattcttcgatacatctactgtcaccaggtacagtttttggtctatagctccacaacgaaatgtatcttcttcaatgtgctcatgttggatttttatgtccatagaaggaagatggtgggtggggattacacattgaaggtcatagcacaatgttctgtaccacgttgaattacatatgtatgcgtatacttggagaaagtcctgatggaggtcatgataatgcgtgtggacgagcccgggaatggatccttagtcatggtggtgtcacctacataccttcttggggtaaaacttggctttcggtatgtattcagatcatctggtattataacctgagaatgactagaaaagttgtatcataagcgtgcgtcttgttgtctgcagatacttggtgtatttgactggtctggaagcaacccaatgcctcctgagttttggatcctaccttctttctttcccgtgcatccaggtttgtttcttgacatcagaacttatgagattgggaaactggattcctcttgttgatatttgaccaaaaaccttatttggcgtactacaatgattaagagtttctctacacaagtatgctatcaatgagatgtattaattaacgaaatcttacagcaaaaatgtggagctactgccggatggtttacttgccaatgtcgtatctctacgggaagcggtttgttggcccaataacgtctctgattttgcaactacgcaaagaactgtacttacagccttatgaagaaatcaattggatgaaagtccgccatctttgtgcaaaggtaagaatgttaggatgtatcgacatttctctttatgattttctttcatggaaaagaacacggatacattcctctactttaccttaggaagatacatattatccccgtccactggttcaagagttggtatgggacagtctttacatctttgcggagcctttccttgcacgttggccatttaacaagcttcttagggaaaaggctcttcaattggcaatgaaacacatacactatgaagatgaaaatagtcgttatatcaccattgggtgtgttgaaaaggtaaaaacaccttaccttaagacacaaagtattgagcatctggagttaacttcagtctctttctgcaggtactatgcatgctagcttgttgggttgaagacccgaatggggattatttcaagaagcacctctctagaatctccgattacttgtggatggctgaagatgggatgaaaatgcaggtatgtccatggagattggaaatccaatttgttacgtttactaaccttgagttggtaagaaatcgaattttttttgattatgcagagctttggaagtcaactatgggatacagggtttgcgatgcaagctttacttgcaagcaatctctccagtgaaatctctgatgtactcaggagaggacatgagttcataaagaattcacaggttcgatatctctgcagcatatactgtagcacaaggaactatttcttttgaaaaatggaacattagcttaaaattgataaacaattgaaggttggagagaacccttcaggtgattacaaaagcatgtaccgtcatatttcaaaaggagcatggactttttctgaccgagatcacggatggcaagtttcagactgcacagctcatggcttaaaggtaaccagccgttaaaactaaacacattgacatgttcttcagtggcatgagtactacatccttgctgttttctggtctcatagtgctgcctgctgttctcgatgttggcgccggatattgttggcccaaaacaagaccccgagagactacatgattctgttaatatcttgctctctttacaggtgagcattatcagacatagaatagaaccaacatcatcaaagaaacacccattttcaggtcgtgacagtttcacttgtttgcagagcaaaaacggaggtatgactgcctgggagcctgctggtgctcccaagtggttggaagtaagaaccaaaccccataattattttcaaacaaccaaaagatactttttaaaacatttgcggtcatgtaaccttcttcatgtatttgtctcagttgctcaatcccacagaaatgttttccgacattgtgattgagcatgagtacagtgaatgtacatcgtctgcaatccaagcattgagtcttttcaagcaactctaccctgatcacaggacaacagagatcaccgctttcatcaagaaagctgcggaatacctagaaaacatgcaaacacgtgatggttcatggtacactagcgattacgatttatctgaaattgttcacggaaatccaaactaacaagaaatgaaccattgttctttgaatctacaggtatgggaactggggcatttgcttcacgtacggtacatggtttgctcttgcaggcttagcagctgcgggtaagacttttaacgactgtgaggcaatacgcaaaggcgttcagtttcttcttgcagctcagaaagacaacggaggctggggagaaagctacctctcttgctccaaaaaggtacacacttgcacattttgatgaaatcaacttgatgtaggatcattcagtcactacaatcctcttgatctatgcagatatacatagcacaagtaggggagatatcaaacgtggtgcaaactgcttgggctttaatgggtctcattcactctggacaggttttaatcattcaatattgatcgacgaaaatacaattaattaatgaatcagtactatatatgaccagtgctttacacaacaggcagagagagatccgattcctcttcaccgtgctgcgaaacttatcatcaattcacaactggagagtggagattttcctcaacaggtacgtttcctacaccaaaatggctactatcatcttaaaacttccaaattctgtaatagctttactgatagaagtggaaaaaacaaagctaaaagctaattgtagtttgtttaattactttttcagcaagcaaccggagtgtttttgaagaattgcacattacactacgctgcatatagaaacattcatccgttgtgggcactcgcagaatatcgcgcgcgagtttcgttgccatgacgacacttttcataaacttttctttatatcagagaacatgtgaatttattaacctatcatcagtctattacaagaattcgtgtatgcgatatgtcaatgtttttagtcaatgttttctttttgtgtaccgtccattggaaggcatgtttcacatggtgaagatacagagatgcgtgatcgtctaaatttagactaggccatttgttacacttttttttttatgtttcttccaatttttcaacatgttgaacaaaagagtcaaaaccacacaaatgtgttattgtttctttatcttttttttgtgttatagaatctgaaattagattatcagccaaaaataaaacccttaaacaacaaccattagaaaaagaggaaattctccaacccattaatcttgcatctctacttcatttgcttcctccataaagaatctttgatcaatcaaactctattttttttttgtcaaatcaaagtgaagttttctcttttgcatcataaagactcaagagagggaagagatacttttcttccttttgttcaataataataatatatatatagagaagaagagaatgtggctaccaaaagcaaatggggcaaagaaagaaacaggaagtggttcagtagcagttgcaatagacaaagacaaaggaagccaacatgctcttaaatggacaatcgacaatcttgcttctcgtggccaaaccatttctcttattcatgtcctctgcagatctcattcttcttcaggtcccaatcttcttctcacattcatgggaatttccagcttttagagtttcttctcgataaagtttaagttctttttttggtttcgttgttgcagatcttgaagaaggaacgccacaacagaaacagcaaatggagaagatagctaaagatctctttgtatccttccactgctattgttcccgtaaagaggtattctctgaatcaaaaacccttaaaggtccttactttgaacaaccctaatcgattctgtttgagcagataaattgtcgagacattttgctggaagacgcagacaaagttcgagccattaccgaatatgtttcatcttctgcaattgagaacttagtcgttggatctgcatcacgtaatggcttcatgaggtaattaaagttaccttctttcagattctgtaacaaaaagtttggatttttgttcaaaggattctgtttttgatgactctgagcagaagattcaagacggatttgccaacaacagtgtcaaaatcagctccagatttctgcaatgtttatgtcatttcaaaaggcaaaattgcttcagtacgaaatgcatcacgtcctgctccttaccaaaattcgatgcagcaatgtgaaattgacaatcatcacccacatactcctgacaaagcaccaaagtaccatgaccatcccaattctgcaggtttagttcattcctctttgaaaagaataaaataagttctttgcttttccaaaagctgatccaattttgtgtgtttccattgattttgcaaacaggtagtacaccatctagaccgcgcaaatcagttgaagcagataggtataggaattggaagcttgttgtgatgtctttaaggttaatgtcttacataaagtcttaaaagattcaacatttatgttttcttgtagatcgccgttggtgaaaaggaagccatatggggacttctatgattcagatagtgacctttcgtttatcagtccgtcttctcatcgtgactctgacatttccttcatcagctcaggaagaccaagcgttgagcggtcttcctttagccttgattttcctgaatctgcaaggacttcaagaatgtcaacgagctcagagcaaagcattggctcaaatcgtttgggaattaagttcagtgatcctgatttccttaacgaatcctctacattctctgaagagagtggtagaacatcctcctattcatctcagagcttggttagtactattattactcaagctccttctctttttcttcttataaagattgaatacttgctaagatgggattgtcttgttgcaggatgatgttgaagctgaaatgaagaggctgcgtctagagctgaaacaaaccatggatatgtatagcacagcttgtaaagaagctttaagcgctagacaacaggtagtacttaatactaacatctaagtcaatgagattagtacatttgaatcaaatatcgatttttgaacttttaggcaacggagctgcaaaagctgagaaccgaagaggagagacggttggaagaagcaaaaagttcagaggaagcagcaatgtcaatagtggaaaaggagagagctaaagccaaagcagcgttggaagctgctgaagctgcaaagagattagcagaagtggaatctaaaagaaggttgactgcagagatgaagacaatgaaggaatcagattcattctctcgcggatttgttcggtataggaaatacacggttgacgaaatcgaagaagctacttcaaattttgcagagtctcaaaaggtaggagaaggaggctatggtcctgtctttagaggctttcttgatcacacaagtgttgctgttaaagttctacgcccagacgcagctcaagggagatcacagtttcagaaagaggtaaaaaaaaaatctttcttcgtttctgattttatacaagaaagttttcatctttgagtaacatatgtttatgttttctcaggttgaagtgttaagctgcataaggcatccaaacatggtgcttcttcttggagcttgtccagaatttgggattcttgtttatgaatacatggccaaaggaagtttagaagaccggcttttcatgcgaggaaacacaccgccgattacctggcagctacgtttcagaatcgctgctgagatcgccacgggactcctcttcctccaccagaccaaacctgaaccaattgtccacagagaccttaaaccaggaaatgttctgctcgattacaactatgtgagcaagatcagtgatgtcgggctagcgagattagtccctgcagtagcggaaaacgttacacagtacagagtcacttcagctgcaggaactttctgttacattgatcctgagtaccaacaaacaggaatgttgggtgtgaagtcagatgtttattctcttggaatcatgcttttgcagatcttaaccgcaaaacagccaatgggtttggcttattacgttgaacaagcgatcgaagaagggactcttaaggatatgcttgatccagcagtaccggactggcctatagaagaagctctatctttagcaaagctttcgcttcaatgcgcggaactaagaagaaaagatagacctgacctcgggaaagagatattgcctgagctcaatcggttaagagagataggtgaagagagtttagagagtgtgttttatgcaggaaatcaaggaaagtctccaaacactagccaagtctcgattccggaatctccagctgcagaatctcaatcctagttttgatatgagggaagcaaatgtgctctaacactcaatttgcaggagttataaacaaaagcagagcaagtttctttgctgattagtgtatagcattagaggaatttggtattctgttaaataatcagttatgtaaccgcctttttgttaggcccataacggttttgaacaatcaatactgtatttattaaagaatcgataatgtaagagcccatataaataggcccaatggctcagaccggtttgacccaaccgggattttggttttattaattaatttggttttgaaaatcaaaatggttaaacccatagctacagataaaccctgcaacagcttcttcttcttcctcttgatgtgggcagaagcaaagtagcgacctttgtcttcttctccatcgtgtttgtttatggagcttttacatacgtcctgcaatttcgaaaccctaaccttgatttctcctcctttaaaatcctgtaactttagttccagctctctcttcttctctcctcgtcgcgtaaccttgtttccagcttaccatagtggccgcgtcactgtttccgcctcgttacagcacggagattcgaattttagctctaattcttcgcagacaaatcaggaagcgcagaattcaattgctgggtttctccgacgagacactggactctcagaggccgattcagatttcatttcttcaaattgtcctaaatacacgcgaatgatcgtagagggtgttagggatttggaggaatggaattcgtggaaagggagtggagaatctgagagagttgaggagggtttagggtttaaggagaaagtgatttatatggtgaaacaaaagggtgatggtggcaaagttgcctttttggagagtcttggtttgagtttgtcttctgctatgtatttggctcattacgtctcctctgaatcgcttccgatacttctcgataaggtaattcacagattgttcaatttctctgcatcatcaaaagagagttaggttgggtttggatttggtacttaatcttggatttggattataggttaagtacctcaaggaaatattcttttctggcagtgatgagaaaggtctggttggaaagtatgcaagacgaatgatgctctacttatccattcctatcgatgaagatgtgcagcaaactctttcctttttcgaaaaggttttttgtgtttcctcagttatattatagtatctgattttgtttttcattctctatattctttagtaaggagaatgttaaaatgtactttagattgaagcaaggcgtggaggcttggatatgctgggctctgtagatgcatcatttagatttttactcgagtcattccctcggcttcttctactttcagaagaaaatgatatgaagcctatggtcgagtttcttgaaagcattggtattccgaaatattgcttgggaaaggtacttcttttgtaccctcccatcatgctcggaaaaactgaggagatcaaacgaagggtagccacagctatggagaaggtatggttggttggttgttcataattagcatggagctgcactttctttgttttctcgtgattgctgattattgcaaattggggttgtataagttcaggtaagtgtagtgaacaaggattctggaaaattgttgctgaagtatccgtggattctctcaccaagcatacaagagaactattctcacatcggctcatttttttacagtgaatcggtaagcacaatttgacaagacagaatacatcacgttgatcagaaaattggtggttttgtgtttgctaagttgtatttatcatttttgttctatgattggtctaccaacacctggtttactttcttaggtgctcaaaatggatattgaccacgccattaggagatggcctttgcttctcggttgctcagccagcaatatggagatgatggtgaaggaatttgataaattaggtgttagagataaaagaatggggaaggttatacccaagatgcctcagcttttgttatgtaaaccccaagaatttcttaaggtaaagaaaccactttccaagatatgtattctctcattctattattgtgcaagactatttctttaaccacgctattcttcatcttgtaacaggttgtttgctttttggaagatttggggtttcaaaaagaaattgtaggtcaaatactgtgtcgatgtcctgaaatatttggctgcagcattgagaaaaccctgcagaaaaagctcatctttctcactcgttttggtgtttccactacacattttccccgaatcataaagaaataccctgaatttctcatatacgacgcagacaaaacagtacttccacggtatctatcttgacccaaatagcacatcatcttagtgaatctatctctagaaaatgacccctaattttgtaaacatatgctcttacaggctaaagtacttaatggagattgggatatcagagagagagattgccttcatgattcgcaaattctcaccgatcttaggatatagcatcgacaaagtgttgagaccgaagtttgaatttctggtgaacagcatggagaagccggtaagagaggtaatagaatacccaaggtacttcagttactcgctagagaaaaggataaaaccgcggtttagggtactcaaagggaggaacatagaatgtacattacaggaaatgttaggcaaaaacgatgaagagtttgctgctgatttcttgggtttaggagagcttcaaactcacagtgaaatctcgtagttatattgtaggtgaaaaagtttcttagagaaaatcacactatgtaatgagattggtgatatctctgaagcttcttcagttttgtctgtttgcattgttcatataaccgctagtgtatgtacttccagtgtttgtatacaaattcctaacttcttaccaaaaaaaaatcggctgatgtgtgtgtataagtgtatgaattgttttcgagggttttcaaaatattcctaccatgtttttggaccaaaaaaaacaaacggtttattgaaaattatgaaaaatatgccgaattttctctctggaaacggtttctcgcaattttttttctttcgtttctgaaactgtacgcgaggatgtaacttcattcatattctgaaaattcacagaaaatttatttatctctttacgtttgataaacatgattgttgagaaaatgattggagcgagtcactgattaccgttctaagcaaaaatgggaaacgctataggcaaagcatcaaacgacatcggaggttttatcgggaatattttcacagcaccgttaaaagccacacttggaagatcctgtttgtaagattttcacgtcattgtctgaattc

SEQ ID NO: 144 - DNA, 78574 bp, Arabidopsis thaliana
aagctttaagatcattgattttgattttacattctaaaatgacggaatcgttgtatcggctgcttatttagggttttgggttttttgtgctgttggtagcttttaattgagtgtatttggtatttttggattagttgaaaaatggttgggttagtttgaatccaattctcgctgagaattttatgctcacgatcattcacataagagattccgctatctgaagaaatcgaagcatgtgaaattttcccttttcctttcgatgtctgcgtttcgctgcgttgtcatcttttgttcttgccatgggacttaaaactaatatccttatacttttcattgcagcttaatgtttaacggcatcaccagcatcttgaaggagtactagttttggttagattcgtcatacatgtgtttgaattagagtaatttgaagggctgttttgttttgtgatggataaagctagacatcaacagctttttcagcattccatggaacctggttatagaaacgagactgttcctcaaccatttatgcctgatcaaacagggagcgcgagtgctaatatgcgacctcccaattctaatggttcagatgttaaggcggtgcataacttctccatacaaacaggtgaggaattctctcttgagtttatgcgtgatcgggtgattcctcagaggtcttccaatcccaatggagctggcgacatgaactataacactggttatatggagcttcgaggcttgatagggataagtcacacaggatctgagtgtgcttcagatgtctcaaggttcagcactgtggaaaatggcaccagtgatattgagaggactaactcttcgcttcacgagtttggaaataaactaaatcatgtccagtcagcaccacaagctttactaagtaaagatagcagtgtaggaaatttacatggatacaagaacacgtcttcttcagcctcaggtagtgtaacagcaaaggtgaagatcctttgcagtttcggtgggaaaatacttccacgtccaggtgattcaaagcttcgatacgttggaggtgaaacacacattatatccataagaaaggatatatcttggcaggagcttaggcaaaaaatccttgaaatctattaccaaacacgtgttgtaaagtatcagcttcctggtgaagatcttgacgcgttggtgtctgtatcatctgaagaagatctccagaatatgctggaagaatataatgagatggaaaaccgtgggggatctcagaagcttaggatgtttcttttctccatcagtgatatggatgatgctcttctgggggttaacaaaaatgacggcgactctgagtttcaatatgttgtagctgtaaatggcatggacattggatcaggaaagaactcgacccttcttgggcttgacagctcttcagcaaacaacttagctgagcttgatgtgcggaacactgaggggatcaataccattgctggagatgttgttggagtcggcgcatcacagttaatggtgaatggtttccaacaaacgtctgctcaacagtctgagtctattccaccaagctcatcgcttcattattctcaatctattccactgaatgctgcatatcagttgcagcaatctgttccgccaagctctgctcttcattatccccagtccattaccccaggttcctctcttcagtatccccaatctattacgccaggctcctcttatcagtatccacaatccatcatacctggttctgccagctcctatggaatatacccacaatattatgggcatgtggttcaacatggagaaagagaacggtttcctctctatcctgatcacagttctaactactccgctatcggggaaactaccagttccataccgatccaagggcatgtcagtcagcaaggtggctgggctgaagggtatccgtaccctggcagcacacccaaaagcacacaagcgctagcagaggagcaaaaagtatcatctgatatgaaaattcgtgaggaagttgagcctgaaaaccgtaaaactccggggaatgatcaccagaatcctccccaaatagatgatgttgaggtgaggaatcacaatcaggtccgggagatggcagttgcaacaactccacctagccaggatgcacatttactaccccctagtagagatccacggcagaacactactgcaaaacctgctacctaccgtgatgctgttattactgggcaggttcctctatctggtattgaagatcagctttcaacttcaagcagtacctatgcccctgttcatagcgactctgagtcaaatttaattgatcttaactacccggagcctgagcagtcttcccaaagggtatattgctcagagagaatacctcgtgaacagctagaattgctaaatcgtttgtcgaagtccgataactcattaagctctcagttcgtaacgtctgagtcaccagcaaacactgcacagcaagattcaggaaaagaagcggttggaaagtcacatgacgaattcaagactgttaatgatgatgccaatcaccatacgcacaaagatgtggaaacaatctttgaaaaagtaggagtatcagatgaaactttggaatccgagcccctgcacaagattgtaaatcctgacgatgcaaacaagaacagagtagtcaatggggcagatactgaaattggtgtttccaacttgagccatgtaaacgcagccatgagtcatgttattcctgaagagcaagcttcgctgcagggagatattcttattgatatcaatgaccggtttcctcgtgacttcctctctgaaatattctcacaggcaatctcagaggatacatccactgtccgtccatatcctcacgatggagctgctgttagcatgaatgtgcaaaatcacgatcgtaaaaactggtcatattttcagcagctggctgaagatcagtttatccaaagagatgttgtacttgaccaagctgattctcgcattccatctgaccgtaaagatggtggagagagctccagattgccttatgtctcgccattgagtagagatggtatttcaacaaaccttgctaatcctcagttgactttaggtcaagattatgggggtaatttttctgaaaaggatgggggtggcactggcagcattccccctgctctagagaatgaacagatgaaggtcactgagagtgaggaatttggtgccatggtggagaatcttaggacgccggattctgaaccaaaggtatgagttagtggcagtttttattttatgatttccaaaaccactgtgtttctgaagagaatggaacatctaggatgaaaagacagaaacaaggcatgctgcgcttcctccacttggctcagagtttgactacagtggcttgcaggtatgaaaaactttgaaaatatacgtctgacaaaactcgtactatctatgcatgggaaattctttgttggggtccatgttggtggaatcagcattatgtttaaccccgactagtttttgtctgtgcgtcttgtttcattttcattgcgctagttctgtcaaaacaattctctgcttctattttcttagtgtttctgctgagctccttttctgtgtttggtttacatagatgtaaaatagtatactcttaaatattactagatcattaagaatgaagatcttgaggagttgagggagcttggttctggtacttttggaacggtgtatcatgggaagtggagaggatcagatgtcgctatcaagaggataaagaagagttgctttgctgggcggtcatcagagcaagagagattggtgagttgtttgcagatcatgtctaatgcatctccctttttgccatgcctaaaattcatgcacctgtgttaatttgtcacactatctagactggtgaattttggggggaagctgaaattctttcaaagcttcatcatccgaacgtggtagcattttatggtgttgtaaaagacgggcctggagggaccttggcgactgtgacagagtacatggttgatggttctctgaggcatgttctggtccggaaggacaggtaaagttcggcttgttaggttctctgatatcactttaattggttccagttcgtttatcttataaagttttatctattttccttctttgtattatcaggcatcttgatcgtcgtaagagactaatcattgccatggatgctgcatttggaatggaatatttacactccaaaaacactgttcactttgatttgaaatgtgacaatttacttgtgaacttgaaagatccttctcgcccaatctgcaaggtaacacgattgctagaccttcccgtcgatgaatttagtttaatatgatttttgaataaatcgcattaatatccgcatgctcttctacctcaggttggtgactttggtttgtcaaaaatcaagagaaatacgttggtatctggtggtgtacgtggaaccttaccgtggatggcaccagagcttctaaacgggagcagtagcaaagtttctgaaaaggtaaacattaatatgataagatgcacagtaaatatcaattaccactttaactgctagaatgatgaatcctctgcaacagtcacctatcttcccgtttatgaaaagctgagatgaatagtgtttagtttcttgagatgagaatcttatgttatcacaaactgactgagaatgcaactaaactagaagatctgttatattcttgtttttttgcctgcaggttgatgttttctctttcggtatcgttctgtgggagattctaaccggagaggaaccatatgccaatatgcactatggggcaataataggtgcgtgcaagtaactcatggtctatcgagtttctgcctgttcattcttgttctgaatgccgtgggtatgaaatttaagatgatgatgacttcattgtgaaagtgcaggtgggatagtgaacaacacactgagaccaaccataccaggcttctgtgacgatgaatggagaacactaatggaggaatgttgggcaccaaacccaatggcaagaccatctttcacagagatagctggtcgcttacgagtaatgtcatcagcagcaacttcaactcaatccaagccatcagctcacagggcttccaaatgaaaaacctttctttttcttatgtgcagtgaaaagagaacataagtcgattacaaagagtccaattcttttatactttttcgatttggggtttggagagagatatttcttgatccttctcctttcctttttttgttctttaacaaaaacaaacaaaaaaaagttgaaaagtttattccagttggttgaaattgttttgtcacatgtatctgttgaatacacatgcatcccttttatagctatgcactgtgtttgcaaagatgaagaattcttgaccaggcaaataacaggaaaggttttcttatgtgagcatatcatatggtttctctgaaaatgttcaactgcagatatatatcatcaaatacagacagacacagtacaaaatccggctgggccaggaacataactgcggatattctatacctaaaccaatgatggggggcaaaagctcttttaagatgatttttttagattgatcaaacctttttggttttcactattgaagaagttgggaacaatcctgtggtgtgacaggataagagtaaagcttctagcttctgtggagtggcgcagcacgtaaatcaactggctgatagctcactcgatccttgtgaggtaaaagctcctcctgaaaagaaagaacaactagtgtcacacacttaaaatgggaactagagctgaggattgaggatcaacaagaagataatatatagactacatcatcagggtttatctggaatggcttcacaaaatcctcaaacattaacggagaaagatccttcattttctcttccacttcctacaaaatgaaagcaatatttcttcagactgagagtatctaagcacataaaaggtcataatgaattgtcattgaagtttcagaaagtgtaccaatccagtaatccttgatttttctaataactctctggtgattaagtccagaatgtgcctgtttgctctcagagcattcatcgcaagttcttcagtctcctcgatatactgtcaccaacattcaaataccatctatatgttcaagctccacatgggagagtttaaatcagattaggtgtgctgagtcgaagataaattacccttgtcaactcacgggtgaatagctcggatacttctaccgacatctctgctggcattacatgaggatggtcccactgatataacatcaccaagttgaaaagaacgtgaggaactactgagaatatgtaagatcagcaaaaatgggatagtatcagtctctgattaatggatatacccggtattttatcagctcgccgtctgggttatctggtaaatccaccattccaatcttttttacaagttgagtgagacctaatctcgcactttgagggctaatcaccatctccctggcaatctgaaaatgtaatgtcaggtcaaatttagaatggaagactaaacattaatattactcaaaacacaagcactttgcagatatgcagttacatagatgttattttagctaccgagttgaaggtttaatcagaagctgaaaagcaaggcacagtaattagttaaacgagaaagggagagtacttacttttgttatcttctccaggtcatcttttcctccatcagtgacattatcgccaaaaaccacacgttcagcacagcgtccaccatgagctaccaccatttgcattttcatataaccaaacgtggtatacccttggtctaccatgtcttcacgtggatagaaaaccgatacagcagtttcctgtaagattcaagagaaaagtttatttaatccattcttacactgtgttgactgttgagtgttcaaacaccactatcattacaactgaaaaatatatatttgaaacagaccttgccaccaggaaggagctgcgaaaatgcatgccagtcaaatcgaggaaacaaatgagccaacactatatgaccagcctcatgaacagccagaagtctcttcttttcgtaagatacctaatattacataagctttaacggttagggcttttttagctgtggagcatagtatgttttgagataaatagtacaaaggatgtcagtacgaacactttgttcacatttctgttgctcttcctctgtaagaagtacacccataccctcgagcaattgtttatctaacacatcaacaatgtcttgttgatatatgtaagaacgtcccttccttacctgtaaaattggattacgatcaacaacgctcctctagaaatggtataactaaattgggaaattgagatccacataagaatatgacataccgacattatagccgcttcgttaacaagattccggatatctgccccggaaaagccaaccgttcgaaaaacaagctggatgtgaaaaaggatatagttgttatgaatgagcaaacacctatatcaaacatgttattgggattgaaaaatagcaggaaaacaacttgccttcccaaagtctatatcttctgcaaggttcttcccagcactgtgaactccaaatatttgcaccctttgctttgcatcaggcaacccaatatacagccgacggtcaatacggccagaacggacaaactcaaggtcgagttcatcaggtctattggtagcacagataaatatcacagcttgtctcaaagaaaacctatcgatacctgtcttctctttcctgcaggtggtacaatattaagtatgaaagccttgatacaaacccgatgaaaacatgtacatatcactaagatttataaacaagtgcagattctcttactccccatcgagttgcgcaattaaagcttcaaaagttgctcttctccgtggatcttttctagcatgtctaccagcaatagcatctatttcatccacaaacacaaaagcaggggcctggagatagtatataaaattagatccacaataatagtgtgagtagaagacaactataccgtatgagctttaaaacacataactaagaaccttacatttcgtctcgcgattgaaaacatctcattgatctttgcagcaccacttttttcactgtctgtgaactccgcaccagatgcaaacacaaatggtagcccactttcctttgcaagtgttcgcgcaaaaagtgtttttccagttccaggaggtccagaaagaagcacaccctgactcaaaaatgaaaacagaggagagtttgagcttagcttagacagttaaatggaataaaccaatatccacatgttagtttttgggtcaagatgtaatttaccctgacaaaagccacatctttttcatagtattgcattgggttccccatgtagatcattagctcatcaagaagatcccagacatcaccgcctagtaccacttccttatacattgattttgtctcactgacatctccaaccggctgtatgataattaaaactcatcaatagaagtgtgaatatgtgggaagaaggcaactaaacaaagaagtaacgaggttaatggtatacagtaacgatgattaccaatataaaattttctgcataagccatatcaaacagctgattatacttcttgtagagaaagcgcttggatgtgataaggagaagcatggcagattctcttataaaccataaaattagtatccccggcagaagtgcaatgaaaactttcatgaagtagtggatctgcctcttctgaagaagatccacctcaactccggcgttgcaaatagtctcaaacaagtaaggatctaagggaatgtcaacctagaaataaaaaggatatgacatggtgaatgtacatcattcatttccaaatacttgcaactataatttttttacttacaatatattctagagggaaaccttctttcatggtcacatacaatctctttaggtcttccgtgaaaacaacagctgcaacctgttatgaacacatacacagattatcgtgccaacataagctaaaaaaaagatctatcatcctatcacgtccagcttcaaattaattgctttggaaaaggaatatattcatcatattttaactcataatgaatataccatcacttgttatcatttaaaaaattcaactggatataatgacacttgccactcacaatcccaaagccggacaagagtataggttagagctgtacctcagaagaatcaagcttctgaaggaagtaggtatagggaagcttagggcgatatcgccaccatctctttgatatccagagagctctagttccctcagtttcagatgtccttccaataacatcttcgcgaagacttttctctacctctttcatatcaaattcaaccacatacttcgccgctgaggagtttaactgttctgataatttttctcgttctaacatttccttccaggttgcaagcctttcccgccaattacctacactgtctccaatttcacctatcatagaagaatgcaatagaggattagatggtcaaaagcacaggttaccaatgatagtagatgagggatctagaagtgctgctctgaaagaaacttgattagtgagataagattaggtcgtcaaaaacaaaggtttcgcacaataaatcacttcttgttatatcttcagcatgccactactaaacaagtatcacctaacgaatgtatactgaccagagacacccagatcttggcttagtttcttctttgcctctgtctgaatcctagcatttctaccaattattttcttgagagatccctctgtggtctctagatcgtcatcccacgcattttctccaacataagaactatcgtggacaagtgttccatcaggcgcttcaatgaacctttttaatttcaagcctttaggtgttgctttcctccacatatttctcttgaacctgaaacactagaataagtcaggacattctacaaaatcaaataaacagaagttcttttagtcttcccactcttgacgctttagatgcctcattagctgagtatttacttgttaaaggatgataccatagtttgaatatgaaccatattttaccatgtcccagtagagaaaattacaatcggaaactgaggattaggaagcacctacttttctatatttccaggagatggctcggggatcaaagcctccataaaagactctgttaactctcttctctctcgttctacccgaggagcttggatggcaacataaactctttgacaagaaagtaacagcgcaaaagcatatatgaacaaggcagcaactcgtttaccgtcccaattcctgatgtcctgatacaatacatcttccctcattaagaaacaacctaatacactagtatatgtcgctagaataagcgtagttgtagtctcctccaaaatttatgcttccgttaaatcaacaacaaaataaataaataccatacgtttgtccctcaatgttttagaacacaagcagaagtctaacaatacttgagaatcagaaatttgataattacgttaaaaagctgaaccagcttaccttccaatgctcccacttgttccaatcaataaacgaaggcactgtctcattcttaaagcgagtcagctcgtgatggcccttgtgcacactatccttaactcgagccacatactcattcactctcccacttgcttcttccgagtcaaacccaatttctgtcttcacagattctccaatcttctccccaatccgctcggcaccaaggcgaatagactgagccaatctcacccacgaaaagcctccatcgctattagatgaagacccactactactttcagacgcatagactcgaaagagctgttttttccgggtagctcccagtccatacttggcgggaaaccgaacaagaccaaaactttttgatcttttcaacaactgagtcgatgaagagataagcggattcggtttatacgaaattgcaatctccatgaatgaaatcacaagaaaaaaattaaaaagagaacaaaaccagacgcatttgaagatttttcccgattaaagagctctctctgagaaaattactgaaggaaaatggtgagtaccaaccattcagctcactcgactctccggcaagacttacgcttctctccggtaaggaggtttatctacactgatccgtcgttgagagtgtcctaatacttcgaaggagaaagatgacgcttaaactcaaagaggctcgaagcctattagttatataattgggctagcccattaaggtccatcagcccactatccgaaaaataatatatttaaaccgtggaatccaaggagagacacagtggcaaaaagggtaattatagggacatttcttggggtgttgtccaagctgcttttatataaggaagggatattgttctctcgcttctcgaaagatccattcaccaactctttataccagcctctgtaacgttcgatcatcttgtatttcatttcaaccactcatgtaagtatattctttcttcagattccgattgttttcttcgattaagttttgagctagattctctagatctgtttcaccgatttggttgatttctccgtcaatctgaactcgcggtgtgcatcttgttgtttgcagtgtttttagtttgttttacgaagaatcaactatggcgacgaagagaagcgttggaactttgaaggaagcggatctgaagggaaagagtgtgttcgtgagggttgatctcaacgttcctttggatgataactctaacatcaccgatgacaccaggattcgtgccgctgttcccaccatcaagtacttgatgggtaatggatctagggttgttctctgcagtcacttggtatgatatcttatctcagttctcacttcactacttgcttatctgttgtaattttggtgtgggaattttgatctgatctgtttatccggagagccatgcgtataagaagagtctctttgcatgttaggatgtagatatagtattcttgtttttcaatatgttcattgactctatcggttgattttctggtgttgtttgggtaattgttttagtaagtttacttggatatgtttatactcaagttcaattggatgatgctgttgaattaatggatgtatctgatctcaatttatgtttcagggccgcccaaaaggtgttactcctaagtacagcttaaagcctcttgtgcccagattgtctgaacttcttggtgttgaggtttgttcctcttcctcttctagacttgcaaggtttctgaacattagcttttaaaagaacactgttctcactctgtttgtgttaataggttgtaatggcaaatgactctattggtgaggaagtccagaagttggttgcaggactacctgaaggtggtgttttgctcttggagaatgtgaggttctacgccgaggaagagaagaatgatcctgaatttgcaaagaagcttgctgctcttgccgatgtttacgttaatgatgccttcggaactgctcacagagctcatgcttccactgagggagttgccaaattcttgaagccttcagttgctggtttcctcatgcagaaggtatttaaaatttgcagcataaagagtatcttcttagatgagtctctttattttactgatcagactattacttgttttattgtgtcaggaacttgattaccttgtcggagctgtggcaaaccccaagaagccttttgctgccattgttggaggctcaaaggtttcaacaaagattggtgtcattgagtctctcttgaacacagttgacatcctcctgctcggtggaggtatgatttttactttctacaaggcacaaggactctcagtcggatcttcccttgtggaggaggacaagcttgacttggcaaagtcactcatggagaaagcaaaggccaaaggtgtctctctcttgctcccaaccgatgtggttattgctgacaagtttgctcccgatgctaacagcaaggtaactatcacagtcattgtggttgactctcaatgggccatgtatgaaagtaaaacatttaagcgtctggtctggtctctttaaagctgacacatatgactcttgcagatagtgccagccactgccatccctgatggctggatgggtctagatattggtccagactccatcaagacattcagcgaagctctggacacaaccaaaaccatcatctggaatggtcccatgggtgtgtttgaattcgataagtttgctgctggaactgaggtatgagcaactaaacacatataaacacaagttttagtctcacttttgtctaaatccatttgtcttcaacatgtttgttaatcatctgtcttcaacatgtttgttaatcggagaaacccaacttaactaacccaatctcttgtcttgtttcaccatcaggccgtagcaaagcagcttgcagaactaagcggaaagggagtaaccacaatcattggaggaggtgactctgttgctgccgtcgagaaggttggtttggcagacaagatgagccacatctctaccggaggcggtgctagtttggagcttcttgagggtaagccacttccaggagtcctcgctctcgacgaagcttgaaaatcctcacgttggatttcatcgctattttgtgttgttatatgtataacaagtcgtctggttatcttgtgaccagacgagcaagccattatttatcagcttgagattttcgtctacggctctctttttatgagttttttagtttggagcctttttttaataataagagatgaaactctgattgacgacaaaaaaagaaaagaaatgaaactctgattagcaaactcctccatacttcaaccaatgatttgtctcttgcctataattgtccatttaaaacgaaacaagatcgttgggacgcataattggcttaacatgttttagaaaaaaaaaaaaaaagaagattcgtattccatcttatttgttaacaactaaaggagatataaagaaaattagaacaccttttactaaagaataccgtgtgttctctacgctaagcggcatacacctatttttggaggagcaacttcatatgaagtccgctccattaaatcatcagttcgataattcttagctaaatagtttctatagagtcgattgttattgagttctcattagacaagttaaaggcccagaaattgcccaataacgacaaataacgacatcagaaatcgtcccacatcggatggaacagaaagtagatgtggaaggattcacatataaaatgcattggtgcactcacttcagaagttatggagccgtgtggtgaatacaaagcgaactattctttcgccttttactaaagaataccgtgtgttctccacgctaaacggcatacaccaatttttggaggagtaacttcatctgaagtttgctccattaatccctcagttcaatctttagttgattaaccattagtaatagtatacaattacttgacaggaaaaaataatgagattatctgaccaaagattgatgccggttctgaagtcttcaggagcggttaagtgaaccaagtgctgggttcaactcatagcgattatagatcgatttgttatttatttgttgataatttatttcgattatagaatccattgaagatcgattactcaacggaaggttatcaagtcagttagtactgcggttaactagtgggttactaaactcaaagttatgatacttattagacgtagctcgtttagtgtgattttgaagagataagaatatatatttggcattattagttagaagatttatgaatttgtttgtttttgtatttgcatttttcggttttctaattctaatatgtaggaatctgatagaagattttattctgtacccaaaaccgagacgttccactaattctcgataccggtttacccactaaccggctgaaatcgatccagactttgctccgatggcagaaaacccttgacgatcaaagaaagccgtcttcttccccagacagagtctcttccatctatctttaatcggaggaggatttgaaatctcttcagatcaccggaagttctgtgagctttctctcccgtctaatctctccgaccaatccaagtgaaggtgggcggcggagtattgccgcctaattcttatctcatttggtgttcttcatttgttagtcatggaatccaatccccttctaaacccctaatttctgcatctacgaactctgcaacaatgagatttgatttctcatcggcttcgcatttactatgaaaccacagatgttctttcgatcagtcattcagttctattcaaagccgtcatggatgcaacgttcctactcttccggtaacgccgaattcaatatctccggcgaggtcatcagcattctagctaagaagaaacctatagagcctgctttggagccgcttgttccgtttctctcgaagaatatcatcacatcggtaatcaaagatgaggtcaatagacaattaggattccgtttttttatatgggcgtcgagaagagagcgtctcaggagccgagagtcttttggtttggtcatcgatatgctctctgaagataatggttgcgatctatattggcagacattggaggagcttaaatctggtggcgtctctgtcgattcttattgcttctgtgttttgatctctgcttatgctaagatgggtatggcggaaaaagcagtggaatcgtttggaaggatgaaggagtttgattgcagacccgatgtgttcacgtacaacgtgatattgcgagtcatgatgcgagaggaggtcttctttatgctggcttttgctgtgtacaatgaaatgctcaagtgcaattgttccccaaatctatacacgtttggtatcttgatggatggattgtataagaaagggagaacgagtgatgcacagaagatgttcgacgatatgaccggtagaggaatttcgcctaacagagttacctataccattctcatttcaggtttgtgtcagaggggaagtgctgacgatgcacgaaagctattctacgagatgcaaacgagcggtaactatcctgattccgtcgcacacaatgctttgcttgatgggttttgtaaattgggtcggatggttgaagcatttgagctgttgcggctttttgagaaagatggttttgtgcttggtcttcgaggttatagcagtttaatcgatggattgttcagagctaggagatacactcaggcatttgagctgtatgcaaatatgctgaagaagaatattaaacctgacatcattttgtacacgatattgattcaagggttatctaaagccggtaagattgaggatgcattgaagctgttaagcagcatgccaagtaagggcattagcccagatacctactgttacaatgctgttataaaggctctatgtgggaggggacttttggaagagggtcggtccctccaactcgaaatgtcagaaacggaatccttccctgatgcgtgcacacacacaattcttatctgtagtatgtgcaggaatgggctggttagggaagctgaagaaatttttacggagattgagaagagtggttgttctccttcggttgctacgttcaatgctttaattgatggactgtgcaagtccggtgagctcaaggaagccaggttattgttgcataaaatggaggtcgggagacctgcttccttgtttcttaggctttcgcacagtggaaaccggagttttgacaccatggttgaatccggttcgattctcaaggcatacagggatcttgcacattttgctgataccgggagttcgccagacattgtttcttacaatgttcttataaatgggttctgcagagcaggagacattgacggtgctctcaagcttctcaatgtgcttcaactaaagggattatcccctgatagcgtcacttacaacactctcatcaatggacttcatagagtcggcagagaagaagaagcttttaaactcttttacgctaaagatgattttagacacagtcccgcggtttacagatcgctcatgacatggtcatgtcggaaaagaaaagtcttggtggcttttaatctatggatgaaataccttaagaagatatcttgtctggatgatgaaacagctaatgagattgaacaatgtttcaaggaaggggaaaccgagagagctttaagacgacttattgaattagataccagaaaagacgagttaactttagggccttacacgatatggcttatcgggttatgccaatcagggagatttcacgaggccttgatggtgttttcggttttaagggagaagaagatccttgtaacacctccgagctgtgtcaaactgattcatggactctgcaaaagagaacaacttgatgctgcaatagaggtgttcttatacactctagataacaacttcaagctgatgcctagagtttgcaactacctcctaagctccctcctggaatcaacagaaaagatggagattgtttcgcaacttacaaacagaatggaacgtgcagggtacaatgttgactcgatgcttcgattcgagattttgaaatatcatagacatagaaagcaggtgctgatagatctttaggtaatgaaatgattattaaaggtttatctacatccggattcataggcattagttttgtggagaagagaaatatgagttttgattcgaatctctttaccttaacactacattagaatagaaaaatctctggaaccggaagctctttgaggaaaaggaaaaggaaaaatatgaggtttatacgtaaatgctttgtatgctttattgttcatgaagtttttccttatctttattgtacactgatttgttttgtattatgatgttaaatttctttgaaataaagactaaacatgtctaaatctttctggtttccttccaagacctgttccaacatttttgaccctcccataaattatgtacacagcttgtttgtaagataagggagcttcctgaatccttttggttagacaaagagacatgaatcaatcataaatacctcttgattcttcgttgtggacttggcttatcagatattgttcgaatcacaagatttggccaaagtttcctgaagttgacatcaacaaaaagcatctgctgatttcaggctggaaagggccttttaaaaaaaatccccgggccatatgaccatatctgtctgacgtggcatcaccaagggctttcctaattcagtatctcagtgccaaaacgacaaaagatcacagtgaggccgactaatcatgggcctgaccgttgatccacgtgtctttgtattccacgtccaaatctcaacccttcctttacatatgccatgtcatcatctttttcaccatttttttgtgagttttatgtgtgagttttttttttgctgtcattaatttagaaacaataatctcgttgtatcagtatctctatttaatatgcaaaaatcagtcattagttttattttaataccgttgaaaaaatgcaataattcataggtgtgccgcagcagattttaacccatcaattttataggaacagagtgtgtcgtctctctacaacagtcgtaggcacattaatactataattgccttaaaaactccgttgagtagacaaaaagagtgcaattccaaagcatttcttattcttatagattttaaaaataggaaaaaggtgtaaatctgcgaacattttggattcttcacgtttgtttatattttgggttggctctacacctactctcagaagtcataagccaagcaaagggggttttagggtttttgaccgcgagccagatctctttcttttgtttctcccacttccgaatcaatggccttctcttctctcctcagatctgccgcctcctacacggttgccgctcctcgccctgactttttctcgtcgccggcgtctgatcattctaaggtcagagacgacgttttacctttaatcgatgttatgttggatatgtttagcttcgtttctgattctcttgcgtttctgttcgatttgatttgcttttagcttaggtcgtgctttgatctgcttgaatttcctttttacgcgcctttggttactttgaagaagttgtttgatgtgataaatattacttggaagttgttctgagtttcttagcgtaagcttgtgacgtttaatcctatttttgtcttcgttcttgcgttttttgtatctagtctcgtttaacgatgaatttcaacttgtgaggtttcaaatcttatttgttgctcttttagaatgtctaatggcaatacatttggagttgtttgtttttttatttaagtttttccaggaactttgcaagaaaacaatcgtatttattatcttttgtcacaaatttctcaggtgttgtcaagtcttggatttagtcgcaacctgaagccatcaagattttcttctgggatatcttcatctctacagttctgtgacaaattctgtaacatgtgtaaaagttattgatgtatgatgcacttttcgattctcagagtgtttgttttgtttatgtttaaatgtacagaaatggcaatgcaagaagtgtgcaacccatcaaggccacggctacagaagtgccatctgcagttcgaagtaagtaagaaaattaatagttttattggatgtgttttcctgttgtgtgcttattggtgaatttgatttgcttgagtagggtcaagtagcagtggaaagacaaaggttgggatcaacggtatgtgcttttattgattgatgccatttgtttgaagtcccagatcatcatttactttcttaagaattttcttttaggcccccaactttttccgtttcttatggaagctcatttcttttttctgtgagtgctgcaggttttggtcggattggaaggttggtcctccgcattgcaacatcaagggatgatattgaggttgtagcagtgaatgacccattcattgatgccaagtacatggtaaggatgccttacaatctgagtcatgttcttgcttgcttgaacctggtatagtttgagaaaacattgaaaatgcgtcatatgttagtcctctttttcactgaacaaatgtctggttttctatccccctattccacaggcttacatgttgaagtatgattctactcatggaaatttcaagggaagcatcaatgtcattgatgattctactttggagatcaatgggaagaaggtcaatgttgtcagcaagaggtatcacctaaaagtggcatgttatcttctatcgctctgagaacaggtgttttcactttagaacttaatcctcttaattcttcctcagagatccatctgagatcccatgggctgatcttggagctgattatgttgttgagtcttccggtgtattcaccaccctgtcaaaggctgcatcccatttgaaggtacgttttcatacaaacaaatgttgtcgaccttgttttattattatattgtttgcttgatattcatcgtttttatagggcggtgccaagaaagttataatttctgccccttctgctgacgcacctatgtttgttgttggagtaaacgagcacacataccaaccaaacatggatatagtctccaatgcaagttgtaccaccaattgtcttgcccctcttgccaaggttggtaatgttgcacaataattttaccctcatttcattgctatgagattcattaaggtcaactaaactgtatttggcaggtggtgcatgaggaatttggtattcttgaaggcttgatgacaactgtccacgcaactacaggtctatataacttactctcctgctgcagatcactgaatgttgataacctgattacactaacctgtgtgttttggttattttttctttcagctactcagaaaactgttgatgggccatcaatgaaggactggagaggaggtcggggcgctagtcaaaacatcattcctagctcaaccggcgccgcgaaggtacacaaaaactcacatggttatcgcaagcatgtaattatcctaaatcgggaatcatatctgagctgtggttttttgatcaagtaggctgtaggtaaagttcttccagaactgaatgggaaacttacgggaatggccttccgtgtaccaacatcgaatgtttctgtggtggatttaacttgtcgacttgagaagggtgcctcttacgaagatgttaaggcagccattaagtatgcttcctaaaattttattgcccgaccagatatcgtcatcgaaacattatcgtttaatgtagaactcttaataacctctcatggtttaatgtaaacctctaacaggcatgcctcagaaggacctcttaaaggcattctcgggtacacagatgaagatgtcgtctccaatgatttcgtcggtgattcaaggttggtctctctccttttcttcatagtcatctgaatctttttttgtggttgaccaatgtggtgattccaatttggttataacaggtccagtatctttgacgccaatgctggtattggattgagcaagtcctttgtgaaacttgtctcttggtacgacaacgaatggggttacaggtacacttttgtttctcatcttatatttctcatcctagctaacagttctaacacttaaaaatcttctcccattttacttacagcaaccgagttcttgaccttatagagcacatggctttggtagctgccagccactaaatacacacaccagttcttgcagaagcttgagtctttctgctttttgcgtaacctgctctacaaagccggtttggatttgttcggttcaattaggtgccactgtgctaggtgttttgaaatatttggcttgaatctcgagcctttactctatttttgttctgttccagtatcagcaaccatgatttggtccaaaagactgaaaaactgtgcgacttacatctatgaataaggggctaagctagttgtactttaccaaaaatagcttaccagtataagcaacgtttggatacttcttgatagcgcatcgttagctttgcccgtgcttatgacaaaagatcactaaccactgaaacatattttttacaaatgaaaacagaaattgaacttgattagcctgtgtaaccatgtttcagaagaaagcttactcgttttttcatccgacgaaactcgtttggtattggcgattcctggaagggaagcatgaagatttatccattgagatggacaacctcatcatctatctcctctgtcttgtttctgatctctttcaaaacttgtttgtcttttctctatcatcaccacttaagaaaaggtggctgtttttgagttaacggaagtagactcactcaagtgaggctatagctaaggaaggacatgagttatttattggccaccatgcggataaggagaactcttgaagtaaggttactcatatattttcacttgccccgatatttcatggaaactacaacattttccacgaactattgtttattacatatgttttctaagactttatttattacagatatcgcctgaaatttcgtattattacaaaaacacacgtaaattttgtcaattccaaatatctccaaatttttgtttgttacatattgttccctcaagtttttgtttattacagattcccctgaacctctcatggtttgatgtaaacctaaaacctcaaaatcaaacaagtttgtcacagaaagatatatagtctccaatgatttcgtcagtgattcaaggtctctcttctttctctaaatacgtaacaactaacacggaaggcatttcattggctacaattatttcaaaatttatcttacaaaaaaggataatagagtgtgatattgttcatcagagacgtccacgtaagggtaaactaatcagtatatggacaaaaaggtacttgtttatctacaccaggaagaaaaacaataccagttttccggtccacaacttttgcatcaccatgcatccgcagccacgtgtgttcttatgaatattaaaatctacttatttcgttatacgacaaacgaaagatactgctttgttgcgtagacaaacaaacaaaatctcttgataataccagatattcttaattaattagtacgttttaaactcaacatacccataagaaaatccagttagctcatggtttcatgttttccaatagatatatgtgtatataattaaacgctttgcatcgtttgtgatttgcatgttggaaataataatgttttttttttgctaatcaaggtttgattaaggaaaaggagtttggactttggacctttctactacaaatacatgtggccctttttggccaacaccaaaagttccaaaaaagaggccaaaaaataagcaacaacttttgattctctcgtaacttcccccacaaaatcagcagagcgagagcgagagcgatcggttatggcggcgacggagcatcgcggcctcagtggaggagactacaatgtcgaccttttaccaattgaccaagacgattcgccaccatcttcatggcgtctcagcctcgacacattccgtctcccttcttcttcaccgttatcatcaggacgtcacaacggccgtactcgcttgtctcgttatctccggactccgagtaagtttctcttcctcgtccttgtcttaaatctccgttcctctgtttcgtcgtctgtatgtgtattatcgatgtactgttacgtgtttacatgatccacgccagggaatgtcactctaatctgcgatttctcttcttccattgatagttttaaccctacgcgaaatctttccgcaattggtcgaagaatatacgtacggtgttcccaatatgttaaccctgtgaaaattgtagagtgatcttaccgaattttctgtttaaaagcaattaaattgattcaaaaaggaatctcagctttctgttttgcaaaattctctgtttacaacttgaagcatatatgagattctattgtgaatctgggaatattcttttggttttgctggaaacataatcatttctttatttctagtgtgatagggacacagaatcatattcttcggagttttcacgcattgtagtttgctgggaggatgataaaaaccattaaggatcgattgttaaacacgtttgaaactttgaatcattaggaataatcaggtaacaaaacttaacatgggttttactcttttctgttgtgaaaaatcagaaaaggaacgcaaagtctcagagtactacaaacagcaagagaagcttctggagggtttcaatgagatggagacaattaacgaaactggttttgtatctggagctccaactgaggtaccactcttgctctcttcatttaggcttcttctgagatctttcgtccattttcttcatatataggagcatcttgttgatttcaacaggaagaactgaagaagcttgcaaagagcgagaggcttgcagttcacatctcaaacgcagcaaaccttgtgctttttgtagcaaaagtttatgcttctgtggagagtaggtctatggctgtcattgcttccactttggactctctcttagatctcttgtctggatttattctatggtttactgctaatgccatgagaacacctaacaattttcgctatccaattggaaaacgacggatgcaacctgtggtatagtctctgtaattctctctctggttcgcttaacactcacgaaactaaaagccatattgcttaaaatttggcagggaatcattgtgtttgcatctgtgatggcaactcttggactacaagtgatactagagtcaactaggctacttgtttccaaggtacaacaccgaggaccacatttaatcttttctcgtaaactcctaacaccagttatatgatgtaatctaatctagtttgatatttctcattgtatagaatggttctcatatgagtagcaccgaggaaaaatggatgattggaataatggcttcagctacagtcgtcaagtttctgctcatgctttactgcaggagtttccagaacgaaattgtcagggcctatgcacaagatcacctctttgatgttatcaccaattcagtcggtttagcaaccgctgttttagctgtaaaattctactggtggattgatccctctggggctatactagtaagtaaatcatcatcaaccttatccattcttgaaatgtctcttgtgaagagatatattgagaaaacgtttattctttatggtttcagattgccctgtatacaatcagcacatgggcaagaacagttctagagaatgtccattcactgataggacgctcagcaccaccagatttcttggcgaaactaacgttcttgatttggaaccatcacgagaagataaaacacatagacacagtgagagcctacacgtttgggtcacactactttgtggaagttgacattgtgttgccagaggacatgaggctgcatgaagctcacaacataggagaaactcttcaggagaagctggagcaactctctgaggttgagagagcttttgtccatattgactttgagtttactcatcgtccagaacacaaatgcaaggtttgaatatcacgataggttaatggatccagaggaaataaattaagcaggatgtctcgatttctctagagtttttgttccctatgtagcattccacaaaagataataagttttaaatcccccaatacgagtgagtgacacctttagaaacgatttggtccttttatgaggtgaaaaatgtaaaatatattcaagcccacattgaagaaaaacttaagaccaagctgaaggcctaaggcatatggctcattaatgtgtactaaatatatattatcggcccgagttacggctcgttaagaaaacatagaaatgatttaggcccaacaaataatgtatgttctatattataagcccatttattattacccagctaagtcggctttgaaaagagtataggcccatttaggtgtcacgctcattagggtttattgtaacctagaatcaaagctatataagccgtcttttccacaaatccatacatcggccaagcgagctcctcaatttttcttgtttacttgtttcctcatcttttagttattgttagaggttatcttaggatcgtagcctgtgatgtttgagattgtccgtaccatctgagtttctccttgacgattacctccactttctgaggctttagatctaagatcattagttttatttttacttcggcgatgatgatgaaacaagattaccatcaaactttgagaggtttttcgctcgttgatgtaaacttctttttataatctgagcctagtttgtttgtttgaaatcttatgtgttacatgttatatgaaatcgttttggtgataggaaaggcaacaaattagagtctctgattcacttatgtcaatagtggataaagcgctgtacgttgccgagatagatatggcgatattctggtacttggactagttttgatagttccatgtgcattcaaaagcccttacatgtttctctcaacttattcccattagtatatgtattttgatttggtaaaggcaacaaattagagtctctgattcacttattcaatagtggataaagcgctgtacgttgccaataattacttggtccaaagatctcccaatcggctttcagtcttattttagccgatatgatcgatgttcctaaattatagattttgttacgtgttttcatatagctgagctgaccatatcatgctatttaccaaatctttttgatcaattacctgacacattgacagacgatcgatttttagacactgaaatatgggccgaaattttgaaggagtaatgtctggtaaagcaatgtttgataatgttatggactgctgcgcttgtagcagttagatttcattgggttataagatcgaattcaatatcccctaaaaagattgatgtaaactgtagctttgtagcagatcataaattatttcataaaacagctttcgacgggaaagtttataattttgatataggaaccggataataattgtatcagtaattcttaatcgggctttggatagtcccttcctttttagtgaattcgaatcgaaatgcaaaaataatgaggctgacgcgcttaattttctcaaatatccaaaaatggccaatttcaaaaggggttacctacagatttgtggcgcgtggtaataactcgcttatagtgcaagtggttattttgttttctaatagttaattatttaccatacaaattgtcttctaatgtgggcttactaaatactttacggccttttcgttttcaggcctagggagttaggcccattttacatctttcttgtcggtttcatttttaatgttcgtatattcgagctcttttctcgtctgtacaatgaacaaagttttactgagaacaataaagatactcaaatcattcatagggtgatcaattcgtataaacttaaattttgttcgaggattaaagtataatttataatgcctattaaggttctttgataatgctatgagcccaattttacgatcgtcgtattctatgctaccatcccattggacaagtacgatgccatattagactatttagttcaattgtctaatttaattccgaatttaaaaggccttaaataaataaatatagtaaggtttgggcgaaggttacaaatcatttcactctttcagaacacaaaatagcccaaaacatgtttcgacgagcaaacttaaaatttgtttatgaaaaccgttacgcgtataagagtaaaaaattgtcgtaactgggctagaaagagctaacgatttacagatcttaggtgcaaaattacttttcgaattccttaaactacagagataagtcgagggagagttaaaacttagaagcaccaaaaaaaaataaaaaaaaaataaaaaaacttaaaagcatcacgcgctagttgacaaaaaaaaaaaaaaaaaaaacatcacgcgcttactttttcgaactatacaaaaatagctaatttcgaaagggggttaaacctacagatttgaggtgcgtgctgataactcgcatatagtgcgcgtggttattttattttcaaacggatacaaatatcgctagtgtgggctttcttaataccggtctttttattttttgggcttaggcccagtttacacgtgtcttatcattttatttttttatgtttttctatgcattaaaaaattccttatggcaaggacaataacaaaaaaaattcattaaagatcacatagtattgtaaatgtgagattaaacatgaaaattttattttccaaaattactgctttttaatgcataagattatacttttacggtactaatgtacaaatattttccttgaaaaatcatttactaaaaataattaaataaattcgtacgtcttttctttttggtcggaattagtacgtcttttctttcttttttggtggctatttattttgttcatattagatcaaacttaggagaaatataaatatatatagatatcaaataaaaagtaagaaacataaaaatattagaagtcaaaataaagaaaagaaaaaatacaacgcgaaggtttgattaccactcaaaaaacgagcagctgtttatcttccaacaaagcttcttcgtgcatcttcgctcttctcaactcgtcatcctctccctctgattctcttaagtcgccttgaaaaattaagacaaaacaacaacaaaagaacaagagaagctctaaaatccagcagctatggcgtttcttctccccaatctctctccttctttccttcttccgaccggaaaatcactcaaagagaaacccatttccaaccaagctttatcatcatcatcatcatcgtccaatagctacgagtttgaagaagatagtctctctccactttctctctttagcgtccaggctcctcctcctgttcgaggtgcgcaggttaagaccaaaccaagtgcgcaggataagtaccagcacggcagcaaagatgacttctacatcaatctcggtttagctgtacgtacccttcgcgaagatttgcctctcctcttcaccaaagatctcaattacgacatttacaggtgtgttttcctctttctcctttaggtgattccttccttaaacctgtcaatgaaagcatttgtgtttcctctttcagggatgatataacattagtggatccaatgaacacgttctctgggattgacaactacaaattgatcttctgggcacttagatttcatggcaagattctcttcagggatatctcacttgagatcttcagggtttggcaaccatcagagaacatgattctcatcaggtggaatcttaaaggtgtacctagagtcccatgggaggcaaagggagagtttcagggtacttctcgctataaactcgaccgaaatggcaaaatctatgagcataaggtcgataacttggccttcaacttccctcaccagctcaaacctgccacttctgttttggatatggtcaccgcttgccctgcaagtcccaatccaactttcatgtttggcgccatggattcatactcatcttcttggattgagttctacaaagcagtgcaaaggacactagacaagcaagaagagcaaatgcttgtgcaagaccatttcgtcccatgctcataatgccattaggtcacactcaggtgtatatatatatactgttacattgaagatacaatacatatatctatgtgtgcaggcatatgcatatgagtagatgtggttgacttagatatcaaagagggtagggaaccaagaatactcatgagcttgtacaacttgcctattgaatgtaaacagaattccttacagttgttttgttatgtaaaacacattgatgatttgtctttacgatcaagcgaaattatatcccttgaaaccagacacaatgtatgccatgccatcataatatactaggttcaattctctcttaatctcaaagggaatatctaagtaggacaacttggcgtaatccaaagaagccatatttctatatattcagtgtgggtgatgaacaagagtgttgatgcagatttgaagtcacccatatgaagtaaaacactaaatctagaataagtagatcatttacagataagcacacacataaaaggaatcataagccagagatttttaccttttgtacggagggatgcaaagaaaaagttaatcattttggctacgctcccctgtaagattcaggtaagcaaaagctcatgaccaaacaatctcaaaacaagtttgagatgctaatgaaatctgtgatctgaacggatagagagaagatactgattgtactagtttgaaaaacagtacatgtgtataaatcataatatctctaccctgtgatgccaatagtcctcctacttaggtgcgagcaaaaatgcagtgagaccgatcaactacacatttcctttctattagcaatctaacaagttcactgctaggtagagagtctcaggcatcagatcaaatttgaaaagtgcaccaataaccatataagcaacgaacgaacaaggtaaagagaggaagaagaattgagaaagcaaaatcaagttgaacttacagtgaactactactcacttgaattagccagttgatagaaattccatgtttctaagttaaagcccaaagctgggttttgtgcctgcatcagcacttcggtttaggataatcaaatgctaaaatacacaagactgaatatggtagacaatgcaaaagatcaattctacatggcagttttcaaggagactatctttagtttatccagagaagagaataggcataattaatgagtgaattacaaatgagaaaagctttgattcactcatggaatccgtaattagagtttcgaaatcccttctctatatttacaacgctgctcacagaaataaacaacaggcgaaaattacttgcatctcaacaccattagaggaggaagagaaaccctagcttaaacttaagatttcacatagaataatttcgtcgtacctcttcctacatcatcaagtaatgcggataaactatcaattagaatcatgaagaaacttagggtttcgtggagatttttaccttctcgaagctcatcttcttcctcacatctgccttttccgctctgtttcgctttctagagagcgagaaccgagaaagaggaattgtacttgcaaacttgtgaaagctgaaatcatttgagacaactttcagtatttgaaacagagacgaattatgaccctgaatttaccgccttagtcttcacatatatagcccaagcccattacaaagcccattagatcacattttagcttaagtccaccgatgctttgttggatttagttctgtatccaacgcaaatcaagcacgactatcatcccgttcacgagaaattacagggttcaacagatatattatcccaagtacaaaatcagagagaaaccacacatatacaaccgtatttctgagtatgactatagtatagagctcaatactttcttaattcgaattattttgaagcgaatgttggtggaggaaacagaaacaaaggctcatcactgactagatcatctttaatctctgggattttgatggggacccaaatgtccgcgagtagacctaaaagtttcagacaaatgaataagaatattgccgggccaatataagagaagcccaacattttcagttcttcagaagcaatctctgatctcttaacttcttgtaaacaagaacagtgatgacagatgatgcattaacatggtgcttctttaaaacgttcaccctttttgcaactagtctctactgaaagtgagaagattataaacagtttttttgtggggattatttaaatgatgagaaagtcgtatcatatatgcccgtttgggtcaccaacctcgcgatcactgagcctttgattttaatcacggtagggtgtaaggtcgatttgaagccgctgcttcccttttgtaaccctctgcggaataaaagagtcaagatcttgccattgttaatggtgttcaaggagacagatccctgaaacaaaaatgtgaaccaaagagtaataattcatggatttaaaaggcttaccgcaatcgcaatgagctcttccaggagttcttctagatggcgcaaaggctttgacaatggaaaaacacaagaatattcacaccattgcaagaacgagatggatactttcgtaaacattgagtaggacataaaactcacccattgagttggaccatcaactggagcacttagaggatcatcatgaacctgatcataatcaagttggaacaacgaatccagaattatgtgaccaataatccaatgagcttgataaaatttctaaaacgatttggtatcaaacaaggtatatactacctccatgaaaattccatcgacgccaactgctacagctgttcttgcaatgcatggtattaactcgcgaaggcctccacttgcaacaccaccaccatccaactacatcagaatgtattgttcgtgttcaaactatttggttattgctggcttcaaaataaaataaaaagttactttttaaaaggatcataccttcttgcctgcaggttgttgtagtgaatgggttatatcagcgacctgccaataaattaaacgtgtatgttaaattgtagattgcagattgaagaacataaagcagaataagcaacatgaaaaagaaaaaaaaggatggagcaagatacatacaacaggacaattagcttctctcatccactcgaagtttcgtggatctactatcaaatcatctgataatcaaaaccaaaaagagtatcagtcagtcaattgtaaaggcagagaaaaaaaattgttttagcaccctctaatgtatacttcagcaatccaattttttttaattccaagagatttgcatgagatttgagaatatctacaatactaaattccgtggacacaatatttgaaaaggagatgataacttactgtatccgaacatggttcctctttcacaaaccataacatttggattcccagccagtctgatcttctcagctgaattctccatgaccttagcatatatataaccagtcatcaaaagtattccagccaaatattttgaccagcttgaaaacgcaggaagaaagaactcacagaaggagcacagaattgtcctttcttaatattgataatttttccggtttgtgctgctgcaaccagaagatctgtctgtggaattacaattaacaacttaaatcatcaaccatagaacagatatcaatccaagatcgacagtttgaaagctacaatcaaaagctttgaggaaaatacagtttagagtctcacctggcgacataagaatgctggaatctgaattatatctgcaaccttgccaactgcttcacactaaggaaaataaaatcacacattagaaggtactaaagacttgctaaatctcaatcttttatgtgattacgttcatttatacctggcttgattcatgaacatcagttactattggtagatcatatgctaccttcaccttctcaagaatctgcgttggagaaccagaaatgtgaccatcattattcttgttcagaaaaaaaaaaaattaaagcaatttcacgttcaagtatatggtagcatcataggggagagtaatgcaatggctgctatcaattagtttacatatataagatcgatcaatactctgtgaaggttctcatatccacagtcctaacatccaattcatctatatttagacatcccaaggcataaaaagagtgattaaaggtatacaggggaagataccttcagaccctcggccatgccaggaccacgaaatgactttgaagaagttctgttagctttatcaaaacttgacttgaaaaccaggggcagcccaactctacaccattcacacacacagacacaacaaaagtagcatgaggatcttgaaaaaagaaaacacattgttcaaagttcatctctcagttgagttctctactgtaatcaattttcatatagagatcaatacacattcatacaaagatctctcagggggaaaaacggagtacaagaaatcatactttgtggaaatgtctttaatgtgctttgccattcgaagaatatgttcctcggattcaatcacatttggaccagccaacaagaagaatggttcagcagcctatacacgatatacgtattagaatcaaactcgattttaccgtaagaagccaacattcaacattctgaaaacaaaaaggcgagactcaaaccttgagctgattgtacaatagtgatgttgccgccattcttatcgccaagccaataatcgcaaaagaaaatcagaatcagaatccgaagatcgggaaaacctaattcttctctgcaacgaagcaaataagaaatggagaattaaggaatctgacctttaacttgatctcgaagttgctgcagagtgagtgaagaaggcaagtgagatctcctctcacctttagcgcgtcgtgtaaattggagatattaactgagaggtgatgtttggatacatggacagattaattcctatccaggataagaacgtaggaatactcgggacagattaattcctatccaggataaggacgtaagctttactcggagacattaaagacgtaatcgaacaaaaatgaactaacaatgatttaaagacgtaaatatcatttccattatattttcagacaagtattaacaatgagagatctgaaacagagaacccgcctacaaaaacccatgacttttgtctcccctgttagaacgctttcgatgacatgagtggtttgggaggtgacatagatctaagctcaggagccgagcttgggaacatcacgttcatcttatgcatcaatatatcagaccgtgatgggatctcgttcagaagaaactgttgcacgatcggtttcttgaaccactccatcaccaactctcctggtgccctcaagacgactttgctgacttcaaaaggcgactcaacagagctcagcatttgagcaattacaatcttcaatgtcggtcctgtgactagctttatacgtctcgggactactccgtagtaaagcattcgttttctgaacctgtggagagtgtgaaccacggctatgagcgcagctccgacagataagtttctcacatcgagagaccaagcaatgtgttgatcaaagacgatggcttttggaaagagtttgttctcgtacgctactttccagacacatcgagctcggtttatttgacccatcaagacaaggtagttgagaaggacattcacaaagtacctagcagctccttcttcgagttcgtaatcaatcccttggtaaaactctctgacaaacgttagaactggttgtttcctctgttctggacctgtgaagagaccacacataaaggcatgagctttatgcttggtagcgctgaggattgacatcaattgtctctctttatcttcgtcttggcatctgacaagatgggcgagaatcgaagtgtaaagcaccaagtcaacttttccagcagaatgcacgagtgtctccagcaaaggcctagctgaatcgtatagaccatttttcatgcatgattcaaataactgcctgatgataaaattgtttgttttgatccctgaagaacccatgaacctaagccatttcagagcaagatccacagaagcatctttgatatatatcatcaaaacatcgctagcgcagacatctacggaataccccattgctttcatctcgagtagtatcttcccagcaacatcgacaagtcttttgttggccagaagtgtaagaagagaaatataactgctcaggccaggccttaacccagcattagtcatggagttatagattttcattgcagagtctacttgcccagatccagcatgcatctccaatagacacgaatatgtggatggtgtcggtaaaaacccagctttctccatgtctttgaaaaccgtcattgctacttcaagctttcctgattttgcatgagattcaatgatcattgtgtacaatccaaagtttggcctgaaacctgacttcttcatctcatcccaaagcctaagagcagtatccagcttaccagctttagcatatgaatcaatcaaggaaacaaacatagttgctgatggcctatggccaaatccctgcatttccatgtaaaccttcattgatgtgtccaatcgaccagctttccccattgaatcaacaagcgaagaaaacacactaaagcttggtcggagtttcctttctttcatttgctgaaaaagcttgaaagctgcatcaagacggccggatttggccaagcttggaattatcagctcataagttgacccatccaacaaactatcagttttctccatgctctcataaatctcaaatgccttatacgggagacctttgttcagaaacaacatcattagattattatatgtctgcgtatcaattttgcatcccgactcttgagcctttttgaaacaacaaaaagcaacctccagtttctcagctttagccaaatactgaatcacttggttataggcgttaaacgacaaatcaccgtgactactcgagtcttgaaccatctcctcaaacaacgactgaatcccaacaaaatcccttccctggttcaacccatcaaacaacacgacataacattcatccgaaggcagataccaaggctgcttcttagcccacctaaacagactcagcgccgcatcaacctctttaacaatcttcaaagactgcgtaatatgaaccatattcggaacaaactggagtttatctaactgagtctccaactccggtccccatttccacctctgaacaacttcaacaatctttgcaacagaagaagcattcatgtaaggcttcttcaatccaccaaccattacatggtcatcaagccctggctctactgatcttattcccttaccactgtgtagtacactacccgactcatctaaatactcaacctcctctgtccagccactagattcactacttccaatcttttcactacaaaacctcctgacaatactccgacattgtgtagtcaatccaacaaaattagggtctctcggtacagaacaatcgggacaaaagccatttctaacagtgaaatagctcaataatcggatgttgaacgagaaactaccggctaatttagggtttattcgactcggagaaatcaatggagactcagaaatggaactcctactaagcgtaaaaatgacatttctgggaattactttcgcggttcttccacggatcatcgaagatgtagacggaattattgggtcatgtaatgcgaagaattgaaatttgaggaatcaattctaacctggactccagagatggcgatttttccgtctcctccgtcggcttaaaccctaaaaccagaggctttagaacagtgtggggttttcccaaaatagattattttttttgaatttcatgttaaattagattcaaaagaaaacgtttttacaacaagtgcagctttaatttagattacaatagtagagaaaaatcattaccaattagcaaaaaatcattttaacgttagagaaaaaataaccaattaaccacacacacatcaaaaacaaaaaacaaaaaaaaattaactcatcaatttagtacaaatttctttaaatgttttgctcatcaactatcaattatcttctacaaaggaaaataaaataaaatcgaaattcatgtattttacttaaaattttagttattttatatgaaaaaaaaatcatataaacacaaaattttgaatctgaatttgattatagagtctagactatggtggatacatggatacaataacactaactcatcactcttataactagtttcctagttacctaatgttaaactgaaaatattttgatatatggtagcaattaaatatttgaattttcccaataatgtctttggttttgtacattcttttaatttttgtagatcaaggatttacttggatgaattgctataaaataaaagcaattaaatagtgaaaaactcatcagttggtttgtaattatattatttgcaagccttttagtctgtagaaaagagcatctaaagagaatatgtgaagcttatgcaaatggatgtagtcaagaaaaagataaatgtaaaagagctttgtttgagtacaaagcaagcaaaagtttatttataaacagctttcctctctgattgtttttgcagtgtcaagcaagcatatatgcccattgccatacatatatgtatattcttctactatcaacataagttagacagatcaaaattggttaaatatggtaaaaatttgcacattgtctccagtaaagtgatcttctgtgacaacgaaagtatgcaactaaagtgcgaatctttatgagaaacagaaccttatatccttccacaggttaccttgcaaggattctttgaggtttttgttttggtttgtacacatgcacatgacacacacacacatacgcgatatatataaagaacgagagagcgaagagacaaatatttaacctatcttggtcctgtttctttgtcttcttactcttgagagtgtatagctaattggttttatttctcttttggtattcatcttaaaaccatggaatcatatcgagtcttcacaactatttgtcttcttctttgtctctttctctcagccaacttcttcactcattatggtaaaatcatctctgtctctttctttctttctctctatccaactctatctctaaaagcatttgatattgattatgattttcttatatagtagtagatgcaagaaaaagcgtgggatttgagagagagccaaagaaggtgatgatgatcaaagcattaaagcacacatcattgttacagaaaatgatgacacagctcaatcttgctcagcctttagactactcttcatcctccaacactcaaccttatggcgttagcacaactctcactctacctccttatgtttcacttcccccactttcagttcccggaaatgcccctcctttttgcattaatcccccaaatactcctccttcctcctcttatcctggtcttagcccacctcccggcccaatcacattacctaacccacccgactcctcctctaacccgaactccaaccccaacccacccgaatcatcctctaacccgaacccacctgattcatcctctaatccaaactcaaacccaaacccacccgttaccgtccctaatccacccgaatcatcctctaacccaaacccacctgattcatcctctaatccaaactcaaacccaaacccacccgaatcatcctctaacccaaacccacccgttaccgtccctaacccacccgaatcatcctctaacccaaacccaccagagtcatcctctaatccaaacccacccattaccattccatacccgcctgaatcctccagcccaaacccgccagaaatagttcctagccctccagaatctggttatacaccagggcccgttttaggcccaccttactctgaaccgggcccatcaacacctaccggatcaattccaagtccatcatcggggtttcttcccccaatcgtttatccgccacccatggcaccaccgtcaccgagcgtaactccgacgtcggcttactggtgcgtagctaagccctcggtccctgacccaattattcaagaagccatgaactttgcatgtgggtcaggagctgattgtcattcaattcagcctaacgggccttgctttaagcctaatacattgtgggcccatgcttcgttcgcctacaatagctattggcaacggaccaaaagtacgggtggctcgtgcacgttcggcggcactggcatgcttgtcaccgttgatccaagtaagagaaatatttgtttatcaactattatttattggtaatattcatttttttaaacaatgttattgaatggcaaacaggctttaacgggtgccattttgatttcttctgatgcatgaagacgaagacagctctcactttacattttgttggatacgaataatatcaaagaaatctagatataatatgtttaggtgggtcgctcacttgtaagttgaaaccaattaaagcttatttcttgggaatggcataattataaatcttatgctaaatacgtatattgcttttgctaatggaattaggtcttctagacttgtggtacgttgcatctacttaactactatcactaataattcctttatttatacacacatcccttttctcccacaatgatttagtagctttgaaataaagtaatatacgcattctcagtttctcaccacgacatctttttttatttatagaaaaacttctacgccggtctattatctcaaacacgtgaaatgtcaccctgctaggttttgctgttgattagcgttgttcactaattttgtactaggtattcaaaagaatcgcaactgcagatttaagtgagtatatatgaaagagtctcaacaatgtaagtgaaacagtttacgtaggaacaatgtaacttgatgtaccttattctgttatacgaaaaacattcgtacaatagaaattaatcgttacaaatgtgggttaattctaccgtgtgcagatattgcgtgagtactttaatcacttgaatattttggttcatgcattttgttcatggtgaactagcaaaaaattagttgctataaaacaatatggcctttttagtaaccaagtaattactggtctagtggcgttttgaagacatatgaactgtggtttcgaactctgtgggtgaaaaaaaaaaaaaaaattttgtattgatcagaaaaattcggcaaaatccagagacctaatgttaaatggatacaaaagaaaaaaatgaatataatgttcgttcagcatttttgttttgtattgtattctgtacctatggaaaattagtttttaaaccagaatggaacaaaaaaatcgaatatatgaaaaagtggtaaactcaaaatcggcaaaaaaataaaaacagaaaaaaggtgagaaaataggaaaaaggtaaaaaagtaaaaaaaaaaaaaaaaggaagaacccttccgatttgatttgattgggactatataaagggaactctataacatcatctctctcacaagtcgcaacgctccaacgacttcaattcaatttactttcgattttgtcctcttccaaaaacccttccgcttaaaccctaattcacttcgccggccatgtcgacactcgaggatggatttccggcggataagctcttcgctcaaggatactcttacacctacgacgacgtcatctttcttcctcacttcatcgatttctccacagacgctgtttctctatccacgcgccttagccggcgcgtgcctctctccataccttgcgtttcgtctccgatggatactgtttcggaatctcacatggctgctgctatggcttctcttggtgggattggaatcgtccactataactgtggcatcgccgctcaagcatcgattattcgccaagctaagtcgcttaaacatccgattgcttccgacgccggtgtgaagttcccggagtatgagattacttctttagatgcttttggtccttcttccttcgtttttgtcgagcaaacaggtgagtgaatcatattcgtttttttttgcaaaaagaatctgaatttaatagttacaatggtgaatttaagtttgtttgttgtattgatttaaatgcaggaacaatgacgactcctaaattgttaggctatgtaacgaaatcgcagtggaagagaatgaattacgaacaaagggagatgaagatatacgattacatgaagagctgtgatagcagtgactattgtgtaccatgggaaattgattttgaaaagttggagtttgttttagaagataagcaaaagggctttgtggttcttgagagggatggtgagactgtgaacgtggtgacgaaagatgatatacagagggttaaaggatatcccaagtctggaccagggactgtgggcccagacggtgagtggatggttggtgcagcgataggtacgagggagtctgataaggagaggcttgagcatttggttaatgttggggtcaatgctgtagtgttggatagttcgcaagggaactctatttaccagcttgagatgatcaagtatgtgaaaaagacttaccctgaattggatgtgattggtggcaatgttgtgacaatgtaccaggcacagaatttgatccaagcaggagttgatgggttgagagttggtatgggatctggttcgatatgtaccacacaagaggtttgtgcagttggtcgtggacaggtaaattaaaaagctctgaatcctaactgtttaatcttttaaaaggtgtaaactttgtgactatatgtgactaaacagatttgtctttttgtgtgatttggacctgttaggctactgctgtgtacaaggtttgttcgatcgctgctcagagcgggattccagttatagcggatggtggtatctcaaattcagggcacattgtaaaggctctcgtccttggagcatcaactgttatgatgggtagctttttagctggaagtactgaggctcccgggggttacgagtatacggtatagtcacatcttctttcggtttaatttacagttttcttgaaactctgtttgttttgatcgttttgtggtaataacagaacggtaagaggatcaagaagtaccgtggaatgggatcgctagaagcaatgactaaaggaagtgaccaaagatacttaggagatcaaacaaaactcaagattgctcaaggagtggttggagcagtcgcggataaaggctcagtgttgaagctgataccttacacaatgcacgccgtgaaacaaggtttccaagaccttggtgcttcttccttgcaatctgctcatggtctgttgagatcaaacatccttaggcttgaggtgaatgaaacttgttgtctcaattctaattcccaaaaactctctaattttgctgagattagtgctaatactgtttggtttttgtgacaggctcgaactggtgctgcacaggtcgaaggaggagttcacgggctggtttcttatgaaaagaaatcgttttaagctttggcctaaaattgagtgctaagagtgtttcttatatcatgttccatgttatttttatagatattacttttcaatctagtaactttagtctttttatttattgacatgatttacattgtctcctaaaatcaattttcctctaatattgtcttatatctactaagttactagaagatttgttgaaattttgaaaagaactcaatataaatgaatgaaaagaaacagcctttgtttttctaaattaaacaaacctcttcttgttctgaagcaacaaagaagaagaccaaagtcttattttcatttactgagtttacctgccagatcaacttggatcaagttaaagattcttcctgtaagctaacaggctcgtagatcactgatttaacaagactcatcagatcatttgatgtgaatccatcgtccttcctgtaaaataagttcaacactttgctcattttcaagaacgcttctttgcattcccttggaaccacacttcctttctcctccaaaactagcttatgcaattcttccctctttctctctgctaaacctttcatcgattctatgatcacttctttgctgcgattgtctctctcgtgtttcatgtgcaatgaaaccgcattcagcttcccttccgcgctttctctctgcaaaaaaacatcaaaagggatatataatcccaaatctatgagcagaggtttgttaattaccattattttgttggatttaggcgtctttgcccatctttcaactgtacagtttagtaaaaagtttgagattttaagaagagtcttaccttaaaaccttgtatgtcatttagaagacgacccatagtgctcacgagcttgtagagctgattatattggtggctatcgactgtcttctctggaagtggaggtccgatcagataggtagctgggaggacaattggtcctaatgcaaatgatatgtacgcattttccatgtaatcctccaagcttggtgttgacttgtcactggaccactcggcttctctcaacatagacttgagcagatccaaccactgcgtaagatatagcaccaatgaagtatggtcagatgagttgttaggctatgataacagagaatataattgtgtgggatgattgatacttaacaattttcacaatgtggtgtgtcacattgcgtccttgataggtgaatgctttgtctcctgtttcgagaatggtgtcccttagaactgagaatatgatctcaacatgttctgagctgtactcaggaacaccgttcaaatcccacctgaaatttgtaagcgaagaacgattatgcttttacgagggaacaagcagaggaagagctcagaagaaggagccaaatcaacatacttttcgaccaagtgtatgaggttttccagttcttctttggaccctccaacatcaaagaagtcgtctacaaccgttgtaagtactccacctttggcccacgatatacgagcatcagatagttcaggagaaaataaagttgcagccccagagaaataacagtaagccagcttctgtctggcaaatttcagttcctgcaatctattctccacaatccacctgcaagttggtgagcagcattgctgaattgtgactacataacaaatagaagtcacacctgaatttataacgtgaactcgttcaagtgtgtggttatatattagtaaaactaattagcttatgcaagaaggctgaataaatgaaaaagcttagctgggagcgcacctatcaagacgttccatttcttcacggtgtatggactggcagaaattgaagtcatccacagctaacttcaggatatcagaggtgcaaatattgtgcaaactagaacacagaagaaaacaagaatgagaatgaatgccctgattagattgtcgtttaatggaagctggctgtgccaaaacatatggcaacacaggctagaaaggaaagaagaggaatttaccgatatgaggtttttgtaactctggtgttttccacagcagaaccattgagtatttttctcctgtgatctgatctttctaggcttgcataggagggaaaagcaagagcatcctcgacctgaaaaagcttcgattctcagatagctctcacaggaggatagataagcaaaagagattacctctttcttgaggtatttatctcgaacagaggtcttaacccagctggacaattccatctccagatattgtttagtccaacaacactgcttcttcaaagctgattcatgtggataactttgagcagccttaaataattctaacacagaaaacgtattcttaacatatccttccaaagtatcagagaaaccagattcttctgcaaatggttttagcggatctgcaacaaatacagcgtctcaacttaacatggacatgcatttaactcaaatctaggctataattatctgaaataaagaggtcacttcaccgtaagacacatcatagccatgagcaagcaataatcgaaaagccaaagcacaagtggccaagtccaaacatatttcttcatccccacgaagccaatatctgttcattggtcaatgatggtttacaagttaaactacaaaatcatcataacaagtttccatatttgatgaaggcatttacctataggtttcatccaatatgcttttgatttcggttttgaaatctctatcaattcctaagctttcaagagtgacaattatactaaggcgtgcatattgatcaaatggataaactgaaggaactgaaaagataagcaaacttattagcagcggaactctctacatacaaaggaaatgatagtcatgttgaaagatatacctgcagcctcgaatttctgaaggagagaacagagataacggagacaaccatcattcccaaactgagtaaaagcagctgctgttgtggctggagaatcaaacagtgacccatttttcctttgatatttgactatcaaatcccaatcttttaggtttcttgtcccctctaaaacataggccagatatgcttctcttccctttgaaaacttttcactatcactgatcaaatattaaatcaacaaaaagttatgaaaacgaagacttctgtacaagaccatctttcagtttcgtctgagtatgctaataaaagagcaggagtataccatttaagatccagatctctttttcgtatcatgtcatccaccacttctgagcccaatggaatcgtcagattcaaatctctagcatatttaatcatcccaggaaatataatatcaaaccctgttggtttctgtatggtttcatcagtgactaatgcagaattcagctcaataaactggagacctggatttttatttgacactcatcaatccatgaatcttccaaaagtgaaacagtaacaaaagagaaagtaaaaaaccgacccttgtttatttgtctttcaccaattccccacttctttaacgcgaggatactagccagtgtagatgataacacatccttcttaagagattgatggtcatggttatcaagtccccaagatccatcttcatgttgattatccaataaccatttcacacactgtgggaaaagtggagcattttgggagctcggtgatggaaccattgctacccaactagtatcgtaggccgaaacagaaagctccactttctccaacatcttcctaatcttctcctttgtttgctcaaagctctggatagtttaagagtattagttggtctagaccagaatttttctcttatgtaaaagcaagcaaaaatcagctgttttgtttatttaccacattgttagctcttgtctgtacttctgagtccaatctccgttccaaagtagctgcataacaagagaacattgccatttgattcaggtaagagagtgtagcaacaattatttacttcattgatatcagtcctaaatcctcactaaaggaagattatgtaagaaaatcaatttcaattgaactgacgaaataagcatttcgtataatccaaaagatcaaatcagacaacaattcgcagagtagggtaaaaatacagaataatgccagtttacttcaattccatttaatcaccaagtacatgcaagcgaagaaatcaaccaatgccggaaatgaaaaaagagagatatcgagagtgagagtacagtaacctgagatcggagacgaacaaccggaggagcgaaggttgatagacataaagaaaccagaagcaaccgaaacggcgtcgtagcaacctggtgagatgtcatcatcatcaacagtgacagtgagagtcaattccagattgtgaaacgaaaacaataaaatcaaaaatgaaagcgacagagagagaaatatacatactcgcgacgaattagccttgacgactgacgacgaccgtaggacccgaaaatatctggaaatctggcttaataaatagtagattattacaagtcattaccatacaaataaatcttttttgaccaattacattacgacaaaggataatcaaaatcaggaaataacgtgtacatgtgtatatcaaccgaacaggtggaccgtagatatcgactcaacaaaaaactacttttatgagattattacaagaactgaagaacatatgattaaatctaaagactgaacaaaattctctgcttattttgcaatttccaactgtaattcatttacattattttctaaacaccatttactggctagtatcttaacaacaacaggacaaaacacaaacgtttgttttcaacaatatcaaaattataaacgaactatatacttattttcgttttttctcttttgttagctaagccaaaactacgccgtttgacgatggagggatcaacgcctgatgctcgaagggctctattactgtaaacctccagcacttctgttccacgaaaggtacgaggggtctccgagttgcctgaaaccattaatacagaagatcatttcactgtacacgttccaaaatctgaaaagtgtaataatgtcttaacaaaatgaagcatgcatgaccctgagagtgacgtaccttggcttaactagatacaatacggcaaatgtaacagccaagaacaagcaaatactgcctacagtcagataagcaatcccgaggaaatcattccttccgccgagccagctagttgttgacagcactagcttcttctgcccattgaagctgtaagtgttgtagttgttctgcaacaagaccgttatggtatcacccgcgtgtaggtctgtctcaatcttcccatacagcttcctaaacgttggcaaagccgcggttcgcatccagactatgaggtcttcttgctcactcaactatccaacagacaactcttacacttgttaaaatcctatcagaagaaggaatctaaattgatcgatattcaaggattttttaccggtttagaaatattaagagttccaccgcctattggtgctcctttctgaaaatttttagggaagacatttttcccaaacttgttttctctgtcactcttccatgagatacctttcttattcacaagaagttgttggctatttcttgaaaagctataagtatcgttgaacaaactccaagcaacaagaccacatggcacaattggttctccacccacattatcctcaggtgcacaggtcttcacatcatgctcttcttttggacttcttagttgtgcatcgtttcgacttttcacatacctaatcatatacaatcaaccagaggagtaactgtattaatgcagggaaagtaacaggcaaaagcgataactattactaagcagataaggcaaagtaccgtctatggttttggtagaaattctcaagttggtagtatacatagacaggatgcttcatagcttttgtcacctgaaaaaaatgaaaggctttagaaagagccatacctagaagaacagctaatatacacaatcatagaaggaactaaattgccatagaagaagacatgtaccgttattgttctcttacagatcttatctccttcaccctgtatgtaagcgaccatgttgtttctagaagatgttggaatacagtctgtgtcatatcgatcaacaatctcgactaccttcaagtatgaatgaaacatatcctcaataaaaccacaaaaccgaagctggaaaataaaccattagaaaaggcagaaaaacaatagcatgatgcacatactccctgagaagcaaataagcagatcactccaaggggaatgaagacaaccccagcgacaagaaatgtcaagatcacctgcaaatggccatgaacaataagaaaacagcaaaaagagtaagagtcatccttttccactattgtaacattgaacttacccatcttggagtaagaattggcttgcacgctggaagctcttgctgagtaaacctagaatctggtaaagaaaattggttccttgtgaagttaagaacagagaatccaaagcaaccatacagtttgtttaatgggagaacaatgtttaaagttttcgaacaaaagatttcaaccaatgtcacatcaaaacccaacaactaaacgtgagtttcaactacacggtgtaggacaacttgaaaaaccaagctgatgaacctatacacctcttgtatatacgaatctacatcaaacccagagtatacaagaatgctattagaaatcaaagaaacatgcaaaaacacatggtgatcgaggtatagcaacaccatcaacagagaaatttttgtcaattcaatacgaattccaggaaagaaagaaaaaaagaagacgaaatttctaaggacgatccatgactatacaaaaagttcgaccaaatcagaagattagaaggatagatagagatagaaagatcacattttggtcgcttggaggtttttttgacaccggaaatctcagacgatccgcctcctccgacggtggaagatgccgcggtggaactcatcaccgaagaaattgattagaaatgaaatctcctctacaactatattccgaatcgaatggacggcatgagtcgttttgggaagaacagatcctacgcgaatgaggggaagaatgttaggttaggcttatgaaacatatctacttggggaagatgtatagatcttttagatgaagaagcaaaactctcgacaaggaaaaaagaaagacgactttgacaaatgctgttatcatgggagggaaaaataaaataataataagccaatttttatgttattttttaaagggcaatttgggtaaagaataaaaaacggaagttttcgaacaaacccggcaaatgcggttaaactgccacgtggattacacgtcattaataattaacccactcgaatacagtcaaataacccacctgtcatttttgacggatccaattttgaagatattttacttgtaaaaaatctcttgacaacatataatttcgttgcctagtagcttcttcacagcttctgatctcactagtgttcgtcatctttgttcgattgaagtttgggaagtggtgatggtaataggagcagcagcgcgtgtagccatcggcggttgtcgaaagctcatctcgtcacatacctccctcctcctcgtctcttctcagtgtcgccaggtaaatcgtctgtcttctcaatcgattcttctgtatttacatatttactcgtggattcgtccgcagtctctcacggagaaaaggatcgagtggtttcaaaatcagaacaatggttatatatctgaattcagtttttctagtatttctcggatcttgtggtctcatggaggaaaagtgaattgggtttcctccggatgtttttgttaaagaacaaatgtgaatacgttatgataatgatactctgttaattcaattgattatcagatgagtatggacgcacaaagcgtttctgaaaagcttaggagttctggtctattacgaactcaaggtctaattggaggcaagtggcttgactcgtatgacaataagacaatcaaggtcatacaactctgccttttaccctctctctttgttttggggatgttattttggaatgctttatgttgacatcatgttttcttcctgacaggttaacaatccagcaaccggtgaaattatagctgatgttgcatgtatgggaacaaaagagacaaatgatgctattgcttcttcttatgaagcatttacttgtatgcttctcttcttcattactttagcttctttcttttcgagcttcttaattctaccttaaactgttccgtctctcctgctcaatgtttgatggtcacttctattcacgctgaacattttgctctaatgctcttacatgttatcacattcagcttggagcagattgactgctggagagaggagtaaagttttacggagatggtacaatcttttatcccgtagcaatgcgttctcttttacttttgtagtgttggatggggatgtttaggattataaggttctgagccacttcatttcaccaaacacaggtatgacctcctgattgcacacaaggaagaacttggacaacttataactttggagcaaggaaaaccactcaaggaagccatcggagaggttaatgattcattttttatttgagaacattgaatgtgctgtttaggcttgtctcaactgttgcaatcgtttcttaaatgcaatatatgattctgcaatttagtttacaggtagcatatggggcaagttttattgagtactatgcggaggaggcaaaacgtgtatatggtgatataattcctccgaatctgtctgatcgccgactgttggttctaaaacaggtttccccattcatgcttctatatttaatacatgcagcttttttgtagtgacatagttctgcaccctaagcttaacttgtaggtgcgtagttaaataattgccaggctatctgggcttggaaacctgtgacttggctctgcattcccacaccttcccaagaatttttttttgcaattttctaagtcttgtagcaatgtgatatgaacttggagaaccttaaccttgctttgcgaattccattttatatgtggatattcctcgtgtacttttttttccatgcaatgtggctgtatttgtaatcgcaagtgtttactatacatctcaattgcttgactctcttgattttctttgcagcctgtcggtgttgttggtgcaattaccccttggaacttccccttagccatgattactcggaaggtcttgctttttttaccattccaatttaccttcttctttctgtaaatagctgcctagtacccagtgagtatgtagaacttttttcattaaatttgatgtagatggtaaatggtattgtaggtcggccctgctcttgcttctggatgcacggtggttgttaaaccatctgaacttacgcccctaacagcacttgctgcggctgaacttgcacttcaagctggagttcctccggtaatcttttatattaggcttgaactatacaaccaactagcgtctctggtcacatctagatggatttcctcatgtcagggaaataaccaataatgtgttaagttcgaacacagtagtctttccgttttacatgtaatctgatttgaatatttgatcagcccatctccaagagtttgtattgtcgtcaatgtggctactatctgatgtatggacccattgatgtaggattaagtggtttaaaggctagttttttacgaagtttcttttgtgctaatgaactctttgggcagaccatctctttagggttttgctcttttttttttttttttttttttgtatttgtaacacttcatgtttcatttgcattattattttcaatagggggcacttaatgtggtcatgggaaatgctcctgaaattggggatgctttgcttacgagtccacaggtttctctaatcatatttgtgtacattctgttatttgtatctatgccactagtagtgaattttgataagtatccttattaattgactgcttttgtttctcgtgctactcaggtgagaaaaatcacgttcacgggatcaacagcagttgggaagaagttgatggcagctgctgcacctaccgtcaagaaggtatacttaagcaacgatatcatgctatttaaaataatattctctagaatctagattgaataccccctggtacctcttcttttttattggtgtaggtttctctagaacttggcggcaacgcaccctctatagtatttgatgatgcagacctggatgtagctgtaaaaggaacggtaagtaatagtcataaggttgaaggcatttctttatccaaaagatgcaaaaacgttgattcatctggaattactcagaactgacagtatcccgtctcttttccatactagatgtgtatatagttttactgcttatatagatacttatgtccatgatccacctatcccagctcttagtttcaagctcaattttcttagtggtgcactatgggatcttcaataccctaaaacattatattacccatttgatctgtgattgcagcttgcagcgaaatttaggaatagtggtcagacatgtgtttgtgcgaacagagtacttgtgcaagatggtaagaattgggatactcggcacacccctcaggatcttgcatccagtgttaatataattatattttttccgcaggtatctatgataaatttgctgaggccttttctgaagcggttcaaaaattagaagtaggagatgggtttagggatgggacaacccaggtatgtcctttttcgatcttatgcttctgctttgtgatgttatacccttgatgattgagggggttacaagaaatatgagaatttcacgttcatgtaccttatttctacgttctgtcgagtagcatcccaagcgatttgattttaaaattaactgagtctcttgtgtgctctactattttgctgttaatctatttgtcgcttcaaaattcttacagggtccacttataaatgatgcagcagtgcaaaaggtacattctattaataatactttgcagattccgtttttcatgcacaacaataatgtttgatgacagaatgtttatagtcttcatgcttgataatttcaggtagagacatttgtacaagatgctgtttctaaggtttgtattttaccttatgcatccttgctaatccttgatttctaagcaatgcagttcatatattctatttgtattcagccaaaaacaattcttgtattgccaatactaacacaagtactctgttcaagtaaaatcttatttattggtgtcttctttttaaagggagcaaaaatcatcattggtggcaaaaggcacagtctagggatgactttctatgagcctactgttatccgcgatgtttcggataacatgatcatgtctaagtaagtactgaaaaatttcacataattgcagtgttacagcttcttgtatctctaaagaacgagttatagaaacatagtgttcctcgcatttttgtgatcagaagaactaatttactttttctagggaggagatttttggacctgtagctccccttattcggttcaaaaccgaggaggacgctatcagaattgctaatgacacaattgcaggtttgtcctcatttaatcttggtaacctttttcttttacttgtcgagtcttaggctaacataataagtggaaatgtgtcttgtgtgtgtatgtgtgtgcaggacttgctgcttatatattcacaaacagtgtccaaagatcttggcgtgtatttgaagcacttgaatatggacttgtaggggtgaacgaaggactcatatcaacagaggtaagaccagggatgaaagaaccacgttctcctaattatagccatacatatgcttacatcttttgattgcaggtggctccattcgggggagtgaagcagtctggtcttggaagggaaggatccaagtatggtatggacgaataccttgaggtaactcacaacactcatttctctcttattgaactcgcttcagttgataggtcttatataatattagaaatctacgtaataaagtctgcaaggttatagccttataggtggttagttttacattttcctgtcatgcgattgctcccaaactccaactataacacagagactatcgatgcgaatctgtcttttgaattgtttataagcataaagttttgcaaattactacttttcatttattgattctgggctcttggctttgacgcagatcaaatacgtatgcttgggagatatgaatagacactgatttggtttgtttgaaaagctttagaaattgtaagtttttctcctccactcgtatccttctaataaaagcttactgtggaacataataaggattcggaggatacttcttaagaaataaagatttggtctacgaccaattgttagcatgatttttaagtaataatttggggtttccattttatttatctttgtttacgttatttttttctttgttttacgttaatttttgtaattcggacaatttttgctttggatatacccaaaaaaataaaaaaataaacgttgttgttctttgcttcatttatcagcaatttttagaaatcgattgggtttatttttcttttttcatcagtatcttgtcattactatttataaacgctttatgtctcatgtgacaatgttttggaggattatgacttattaacagtcgatcgatttatcgaatttagtgttatatattaaaatattaattattcaaaaaaattggatcagttatgtttcaaaatagcgttagattacatggctctatgccaaagttgggattttatttttgtttgtagtttttttaagtggggaaaagataagaaggttagaaggaatatattcatttcggagaagaaatcccaaagcaccatcacaaaaagatgcttgaagttcaagcaactgtggcctctatttttttataagccgacttactttattgtcactaatttcatttctttctttctttaagctcttagtttgcttcaacaacaattagctaaaagttaaacattagctttacttggtttaactaaaaacaaaaactttggtttctttttttcaaagcaaaatacaatttagcttaaaatcattattgaaaacattaataaagaaagatgagaacttaaatgattttagggcggatgatttgctaatgctaatatgcatcatatcactatgaatcaattttgtagataatagtgatgatgattgtgaaaacacaaatatcgtgataatataagtaggaataatatatgtgtgtatctatactcaaaaagtggtaagaaaaaataaaaagtctagtaaactatgtaaatgtggctggccaagtttatacggttggcatctatcgcgggagttgtattttcattttttaatattgttggcgcaataagaatctatctttattcatcaaagaggagaagaatcgattccaattctcatgcaatttgaactttgatttaatatttaaattcaaaagttataaccattttcttattttatcttggtcagaattgtgtgcggtaattgattaatttaatttattgtacaaataattcgtttcacagccaagatttttaacatttctggcaaagaaaaacactgtttttttatttattccaagaaattaatatctgaaaaatgtgttaccatgtatagctgcacaatcgtcagtcctacaaaagccaaaaaaggttatagccccagcaagctttaaccaataaattaaaatggagaaaagaagaaaaacatatggtaaaaataaaaagaataaaagagctttaataagtagaagaagaggtccccaacgttaactctatctttacacattgatgcataattctccacatattaatagtccgtgtttataatatgtataactttaaaaaattgttccatattcttatgttaatttttttgttttaattcaatattcattgactggtattggtctacattttaacatgtacatgctttcccttaattaatacttaatatataacctctaataaatttctgattcaattcaaattttattcttagataatattctctcttttttgtgtgtgcatatcagcctcagccatattcattgacttattcttgttctatgtaaatatgctatgggacctcccactcatatatatttaggttgaccatttattttacatgcatgcaattgaatttaggggttaatctaaatcgttgcgtatatgaattatatatgattttagtttgtatattgaaaaatgcatcgtcgttctatacataagctagtttagtagctaatagggcaatattaacaaagttgattttctggtttgtagtgtccatacaagtaatttagttaattatctcgtttgttcacctttttgtttcttttttcttttgctagctagttaattgcggatgtaaactacatcttttactaatcgatgaatggaaaacgtttttgtcgtagacaaatattccaccgtacctaacggttttggattgcatgtatataataaatttgttccaaaaatatacggtctattaatttataacgaagctcatcattgcttagaattgtatattcacctcataattagccaaaaaggtttaccctaccataaatgataaaatccctagccttgtggaatttgtttcgttaagatatttgtatgtatgcctccaattacgatatatgacgatgtagacaaactataagtctagtatacgactctcctcgtgcggtcttaattgaatagaatacatagaactttaatatattcactttaaaagtttatattttcctataaagaaaatatttacaaatctttgattactatttactccaaatcaagcatgattaagaaaatagtatatagaacaattgtatgataaatttggatttaaaaattacttctaaattataaggtagtaaagaaaaagaaaccaaaaatataagaataatagatgtgcaatatctttgattcaggtgaattatattttaacttagatatctcaagtcattttaatgtttatatcaggaaataaagaaataaaaaccatcatgcaacaaatcatgcatatatattagatacatccgtaaccgctttttttcgtcttttttttttgtttttttcgtcgtcacatccataaccgttttgatatgagatctccgatgttcaaaattcaatttcccccaaagatatcaatttaatatctaatatatactattattttaagtttgcgcagtaatttaataatctgagacagacatgatttacttaatgtatacgtatagtggcttttacacacattttatattgaaagaaattcaaaggtattcaagctaagaggataaaaaacacaaatgaaaaagatagcgacagtatcttttcacaaaggaacgtctgtgtactagtctgaaactttagttctcttccttactaacgataaaacatatttaactaaaccataatttatttacaaacaaaacaaaaaagacgagagagagaaaaaaaagccgtcatctgatctcttcaaaaacgcatcgtattctctcacatttttgcatcacattcgtttcttgaatcccctctttcagagagagaaagagagtcagagagagagagagagagaatgttccatgctaagaaaccttcaagtatgaatggttcatatgagaacagagctatgtgcgttcaaggcgattcaggccttgtcctcaccaccgaccctaaaccgcgtttgcgttggaccgtcgaactccacgagcgttttgtggacgccgtcgctcagctcggcggccccgacagtatgaacacacatacacaaatatatattcaatccatttaaccaattataaatgtgttttttcaaagtttttgatcatttctatttgcagaagcgaccccaaagacgattatgagagttatgggtgtgaagggtcttactctttaccacctaaagagccatcttcaggtatgtacacaaatatagattagggtttttttcttccttgcttttaattttctctcctctttatcttttctattctttttttcacttaataatataatataataatctaacaacttatttggatctatgggtgcagaaattcaggcttggaaagcagccgcacaaggagtacggagatcactccacaaaggaaggttcaagaggtgaccactcttcctttctctatcaaattagggtttttataaaaaagttacccataatatagatatgtattaatgtatatatatgttctttgatccgtcttcttctaattttttttaccgtacgtgtagcttctgccatggatattcagcgcaacgtagcttcttcttctggcatgatgagtcgcaacatgaatgagtaatattttaatcagatttcgttaattttctcaactttcattttaatatatattacagcaactcacaccaggttggtttgatcaggatgcaaatggaagtgcagagaaggttgcatgaacagctagaggtaattaattaacctatagatattctatgataactgcttgtacaaaatcaatttgtatcccataaatatagtaaatgatttcattcaatttttataggtgcaaagacatctgcaactgaggattgaagcacaaggaaagtacatgcaatctatcttggagagagcttgccaaaccctagccggtgagaacatggcagccgccaccgcagcagccgccgtcggaggaggatacaagggtaatctgggaagttcgagtctttcagcagcggtgggcccacctcctcatcctcttagtttcccgccgtttcaagacctaaacatctatggaaacacaaccgaccaagtcctcgaccatcacaacttccatcatcaaaacatagagaaccatttcacgggtaacaatgctgcagacaccaacatttacttggggaagaagcgacctaatcctaattttggtaacgatgtaaggaaaggactattgatgtggtctgatcaagatcacgatctttccgcaaaccaatcgatcgatgatgagcatagaattcagatacagatggctacacatgtctccacggatttggattctttgtcggagatctacgaaaggaaatcaggtttatcaggtgatgaagggaataatggtgggaaattactggaaaggccatcgcctaggagatcaccattgagtcctatgatgaaccctaatggtggattaatacaaggaagaaactcgccatttgggtgatacaatttattaatttttatctatgagtgatgcatgggaatgtaagaacgagatatatatgttttgtcattgtgagtttgacgtagggtttagagatgagacaaaacaaaacaaaacaaaaaaaaataaaaaatatataagctttgttatgtttaccggattagttttgctcgtgttttataatctgtacggaaactatatattattgctgttcttataatattttaggatctatatattttgtacttattcgttacttatttcttctagtcaactgtttgatgattgatctttacattgttagtctcagtagaattgccgaatatatgttttgttattcttttatcacccacataaaatctgtagttgccttttatggttaactagctattttcatattctatgtttgatagctttttttaatggcaatttcaaataaattaagtttaatttcttacatccgcaattttatttcatatgtacatacttgtacgattttcatatttgacagtttgccaattagaggcatataaaatgtgaatgtactaaagtatatctagtacatgtatatgataaatcagtacatatgtatattaccttaaccagtatatatatcccatgcatgaacgtaactgtatatatgacaaataataaacatttatgtgttaagagctaggttgctcatgtttcaaggcatgtacgatattttaaagcttttgaagggccctttgctttttcatgagttagttatttctatctcaagttagtttgtacttgatgccttatatatgattacgctaaaatgggatatctgcatcgggaaactaaattttcaatcaaacttaaaaataaagtttatggtaaaaaaaaatcataagtaaatacgaaaaagaaaggacagcgcaagtgataatgatgatgatgatccccatcaaagcaaaaggtttttagggttttgggaaaaccacatgcaaacaccaagaaaagctgtaaactttgattcaaatgtatatatagtcacttgattttgtaggatactactatgtatatgtgtatgcagttgtacgcatatgtaagtaagtgtgtatgtagagattgatagctacaagatccttttcaaaagaaataaaagaacttgtcataagagaaattaaccgacactgagtatctatctttccttccgtatatatctttgttctttattcttttatttcttttctgcttcatatgaccactaattaggacatatatttatacaaaagaaaattattacactgatcattcttaattgaatttcaggagcttagttatagatcttacaaacatcgggaaaaaatgtttgtaattcagaatttttgctctgctatgatttttacttactcgatgcatccatttagtcacaactacaaattacggctcatatatgtatatgtttatataaattattactgatcaactttgttgggttcagagagagaaaatataaagatctggtcatcactgcaagttggcaagtaaaagagaaagctctctcagtctctctcactctctctaaaagctgaggaaaacaaaaggcaaaaagagaattgaagaagaagaaggagaagcatagagatattaacgcactcccatgtatgcacttctcgaggaagcttctcttctccttttacatacgcccccactaattccctctaattacgttcctcggtttttttccttctatttaattaattggatttgaagacaaaaaagagtagacgaccatgtaataataattaaaaacaaaaaaaaataaatcagataaatttcttttatttatttattattataaaaatactatataaattataactaaaaataattattatttggggatacatttgaaatatcatatactttatcaataaattagttatggtacaataatcaatttaattgtgaagatgcattatatacaaagtggatccgacgaaatgacgatgatgcatgttttgtgaatattcatttcacaataaaatcacaccaaccacaagttaattattataactattcggtgctttttaatatatatccatctgaacatctcattctgttacttttttttttcgcattcacatgcataaacgtgcatgtgatcgtagctttacttgtatatcataattttaaataggctaatagtaaagctaatgtttgtacacatatcatatggtaattattatggttgttaagcaaactaaagtacttataataaacaaataaagtaataaaggtaacggtcttggatggtctatgcacattcttccatacaaatcctctgtaggcacctcattacgatctcgaccttggattccattttctactcccttacttcttctgttttccaaaaaaaaaaaaaaaagaagaagaagaagataatatacttctttttgatattctatatttttcaaaatgatactttatttttggtatgtgttgatgtagaatgctctcttaacaaagtacattcccgaagcatctatttttcttgtcccttctttctctactgtcgtcatttttccattacttctaagttctaacctattttgagtattttccaaaaaattcaaataactattcatatatttttattacggaaagaaaaataaatcattagatttgttacattaaaaaaaaaaaaaaagaatagagaagaaaagcccatttgcatcagtttcttgtttacgctgaagaatcagactgggcttccatataatgcccactaagataagtccaataagaatgttatatatcctccctagtacgaaaaaggaaaatccctagttgagaatcatcaatccgattggcggtaatgacgattctggtttcgtgttgtgaccatttccgatcttgagaattaatcgtagacttttagtaaccaagttaaccttagaaattgtttgactggttgctcatatcactaaatttccgcatatagggttttattcagaaatttatggagaaaaattagagtactcatgtcgtgggttctgatttgactctcttgtaccaggaataatatgggtatcattaagggaaatctgaggccttagttagtttgtatgatttttttttgcttgatttaatttcaggaaaatgaatggtttttacttaaaatccaataacttttaaacgaacgattctgatttctccaacccaatccaatattagaactcgtcataatcttacaagcttacaacccaaaataacaaaacatggatttttagattttatagaacaaacatgtacatacatataccatcaacgaattaacccaccaataaaattgttttctggttattaaactagtccacataatcatcgggaattaacaatactgtaaatattattattgttagggttagtatcttcaaatatatcggcgggaggaataaaggagtccaaagagagaccaggcacatcgaaaacgacgtcgtctatcctccaaatctcctccatcctcgttctgctatactgcaacgacgtctccccaaatcggaacaccgtcgcgacggcacgaccacaatgcgcgacggctactccgtcaacgtcacggtaatctccgatgcttgttccgatcgtcgtctcccagtaaaccgcctcgtcctcaggcgagatcgtcataaccctagtgaggtgcgaatcctctaaatagactaatagaccgcttttctgacagaagtatccgtacagtgcgtggcgtataacctccgccggagctccggcgtcattccgttctaacaacgagtcacgatcggcggagactttgagcacgaaacagtcatcgtcgccgattcttcgttcgcctaagcattgggcctttgcgaataggcttgctgtggtttttgggtccaagccctgtagcccaattacaaaaacaaacgggtttattaaaaaaatattcacaaatatctttatcaaaaaaaacagaaaaggaaattcacaaatatattgattttgtgttacttaatttaaataaattatactactatccaagaaaaatgtgtccggcaaatattcgttggggtttgaacgacaagaacaataaagcaaaagatttaaaagaaagaaagaaagaaagaaagataaagtgaaagacaaactttgataatcccaagaagttcccccactttaaaaattgaatgaatgtgtaagatcgtattcatgatgaagcatatagtacattacatagggtttcaatactattagtataatgtcatattatttaaaccaataattgtacacagtcacttaacaatgcgctctgaatctctgacaatttaattatttcactatcttttagaaataccccaataataataaataatctaggacaagaacctcataccttgctaaaaaaggaactaaaacttgaaccattagcaaaacattttgtaaatagtaagtatacggactaatcttaaagaacaaaaaaaacaaatatacgattcaataacagatgacgtcacgtgacaagaaaggagaaaaccacgtgtggtggtgggagagtcaagagtgggtgaatggggttttgtttgattttgaagtttcaagagaaagcaagcaaaaggaggagacagcttctccatcacttgtcaggttagtatttgttttttttttcaaataatattattagcttattggacagcgaccactctttttcctaccacgtccttatctcttggacaatcttattacgtcatctctcctttttgccaagtttatgcaattattttcttctaaatcaatgttaatactatttttactaactaaagttatgttttgtagtattttcgagtaattatcaacatgaaattacctggattagacgacgaagtggacgttgagggcctttagcggcgtgagtaccgagccatggcgtatggcgccaaactgttttaccgtccgagccagagatgagtttagttccaccgagaacaagctccagagaccacattccaggctgcatctgccacagcacgaagcaaccactatctccgctcctaccgtttccaccaccgcctagtgtcttcacactttttccggcggctatctccgtctcacagcaactcattttcattatccccgtcgcgtacatgtttttcgccgccttcgctcgctttagacatcccgtcgccgctaagtattgttgtattatataatgcgctgtcgacgtctcctgtaattatacttatgtattattaattaacaatccacatcatactaattactttgcataatcaaatggcaaaaaaaatcattggtctcagtgatgttttaacagacaaacaaattacatgttgatttcacatgttttggcccataacaaaattattaacctttgaacattttttcaaccaatcttatctcaaagataactattcagacgactttgtttggccaattcaaataattaatataaacctaccgtttgaaatttcgacacaacaaataaccagaaaatattttttttttctttttctcaaaggaacaagatagaaatataataaattaagaaacacaaataaaatttgtatactgaaaataaataaataaatataaaccaaagagagggaataattagtaatactcacaaatgggacattcttgatttggaaagaaccaagaagagggtcatcgggaaataggtcagagacgacaacggagattggagcaagaggacaacccaagacgccgagcaagagcctcaagtcttgtcccttagctggcacgtcatagctgttgcaaagtggttggaccgaaggagatgacatatttccagaaatgcccttatgaaccttaaaccattctctaattgcttcccatgagctctccttcttggttctttcgtcttgcatgtctggatctggtccttccattaacggtgttagggcttgtggcggcgttccccatctttgctttctccagtatgactttgagttgctcattctaatcaaagagtgatggtgatcagtctgatgtttgtgacgttctttttttttgtttgaatatctaacacaatggtttttgtaatggatagcgattattggcgtatttatatatatgtatagagatgtatatgtgtgtagagagagacaaaagggacattttatcagtctagcggtcccagaagtttaacattataattttaaattcatgggaagaagcttatagtaattagttcgaatattgacaataaaaaataacttatttggggttttaaggtttctttaaaaatttaattaattcttgaaactacgtatggctacttgttgtatgttatataatctgcgtctaatagtaatagactatgttttatataattggtaaaccgtgtaagtattctgcgtgatattgatttttgtatattcagcattcagctatatatgtgacaaaattatgtaagttttatatgaatttgtcttgtcatttaactgtattatatggttttattttgtcgtatggaaaatcaagagttatgttacaaatgtgtgtgtttcccaacttgttttctgcaaatatgttatctatctatcttgaagagacaatgtatctataattagtcatacgtggaaaggaaatgtggaacagcgactaataacatggaataaaatccgagtcatgtgaatagatccgatccgtgcagtttctttttgtacactatgggctctccttttgagtcttcgatcacacacttttttggtcctttaaatttgaatatcatattagctcgattagcatatgatctttgtcttgtctttcgaggatatctaggctaatcattttaatttaattgtaattacgatctctaggtatgatctttcttggaaaatgacactacacccagtgatatatattactgtggattaatgaatttttaatactgtttgtagttttctttttgtcaaataagagatgttgtgtctttttataaagggcccatttaaaagatactatatcaaatacaatttttatcttttatttttgttgttctttttcaccttttattctccggatgtcttgggattcgaactcacttaaattcctcatagaaaccaaaacattgagcactaattttcctataatctcatataaatgtggataaaaaaattatgcatacataaataagattatttgaaaatattgaaatagtgattagttaatacctaaaacataatactaacaacataaccctaatgcatatcaaatgaataataaacatttgaacaatatgtatatataatatatgcatattcaacacaaggtggcaagtcaccagtgagaatggtggcggtagatgaacatagataatcttataagccaagcttataataatttattttactattcaatttgatagtcccctttctttattcgttatattatatataacataatttcttggcgaattatgacaaaaacaaaaaaaacaaaaacaaaaaattatcggcgagatgttaagagttgagtggtcaagtttcacaattctctgcaacatgtggaagcataacgtacttatcgtgggccacacgtgagcggtagacttctcaatttgagtaaccaattaaaatgggctttacttaacggcccagtatgaatttataagcagaagtgtccatgttgatatgtcgcatgtacttacatcagcaactatgtatttatattgtgcttcaattattattggtcatagtttaacacaaaaaggcccgcacagatacaaatcttaaacagtttgttcaaaaagacaaaaacaaacaagaaaaaaacaatttctcattgatcatcaaagatcagatctcttgaccacacattatatattttcaaaagtactagttgtttgtttttaattttgatgtaataattctcacattctcaacaagatcgatcaaagtaagcaaccatggcggattcgttggcaccattgttgcccacccacattgaagaagatgaagacacttcttcacctctgactttcgacaagatcctcgagaaaagcttgtctgatttcggattctcgcagttcttacagatagttctcgttgggctcgcgctaacctttgactctcagcagatattcatcaccgtcttcacagatgcatatcccacgtggcactgtcttgaccacacgatctgcaatccggcaactaccgatatctgtaagattccccggtcagcttgggattgggacggtggtttcaaaggtaaatcagtcatttcagagttcgatctcgagtgctccagctccttcctcagaagtctacctagttcaactttttatgtgggttctatcgttggtggagtcgttttggctatgatccctgacggttccttgggacggaagcaacttctttttttctcgagtttcgcaatgtcactcactggaatctctattttcttatcctccaacatatggatctactccttcttaaagtttgtgatcggattcgcgcgttctcagaccgggacatacgcgttagttctgataagtgagcgaatttccaccaaatggagaccgcgagctactatggttccgtttactctgtttgtgttagggttcatgtcgttgtctggaatcgcttaccttgtccgacacgcttcttggaaagttctctatctatgcacatccattcctgcaggaatccacagtattttcatctatttctttgccctagagtcaccgcgttggctccatttggaagggaagaacaaagaagccattgaagtgctcaaacggatttcacctgcaaatagaggttacttggaatccgtatcttcgaggttacgtccaaaagaaacactagagcaaacttcaagctactcaatcaaagacttgttcattataaaatgggcttttcgaagagtcacacttgttatgatcataatgtttgggttgggaatgtcgtattatggagttccattagcggttagagacataaaagtgaacatttatatgagcgaagccctaaacgccatggtggagttaccaacatttgttgttacaccgatcttgctcgagcaattcagcaggagaagctctgtgcttgtaaattgcttaattggaggagcatcaggagtgctctgtttcgtaatgagcctttacggaagaacaaaaatcgcttttgctctcgaactcggttctttcttctgcgctaggattggattcaatttaatggcgatttatttggttgagttatttcctacatgcgtgaggaatagtgcaacaatgatgcttagacaagcgcttgtggttggaggagcttgttgcccactcattgcttcgcttggaagaaatgtgccgtcactctcttttgcagttttcggatttgcaatgtcgggtctcgggttattcgctttgcttcttcctgagaccaaagggttaagtctttgtgatacaatggaagagcaagagcaaagagaccaagccttgaagactagccatagttgctgaaagcagagttttttgaaaaacctctgttcttttattgaactttcgtataaaacctctgtttagctccggttaatcaagccatatgttgattttccgagtaattaatatgcgaaacctacaatggcatgtattttttataaactgaaccatttcattttcttgattacaaaaatctgcataaactaggaaacgtttgctaatcatctataaagctatcatgtgaatgtctctgtctttgaactactaatacagaagcatttacatctaaagacgaagccaagaaatcaccgacagttccaagctccggacactcttcccaatctttcattctcaccgtcatagggcaatctcctgtgctctttccgaccacaaacagtgaatacatctctccaatctctcttagaatagtcagcgtatgcggtccattgctcactagcttctctatgaaccccacttgtcccgttgttacaaatctgttgcacagtggaaaataatgtcaaaagtagtttctttgatggaaactgaactttccctagcttagataagaaacaaagaaacagagtagcggcgggaaacagagctcttctcagaaacagagtatacacaaaacagagcagtgataaaaacagggtataagtaaggtacctgttatagaattcttctaagaagctccgatctgtttcttgttcagtttgattccttcccagaacttccatgaaaacctcattattatctcgtgtcatagcatttccaacaggagtctctgcctttgattcctcggagacaaactgtataactgtgagatgaatcagagtattattcgcgagccatctgcacagagcaagagcctcacgatcatccggaccaccaaagaacaatgtcgcgacgtgttgtacagaatcaaacccgtgcggctgctgaaatccggttatgttacggtccacaaaaatgccaatggaacacggaccgtgccttagaacattacggttcatctgtctgaacagttccccatcgtttgtagtcttcccatcgattctctggtgtttatgaaacggaagaaatacaatggaaactcgaagatcctctgttgcgttacagatctcttcgtgcatattaagcatctgagtcacgagcttcacttgttggatcaagattttgctgtctttagcaaacgaatcaatcgaatcgttgatctctaaaccttcgttggtcccgaattcgtcatctccattcgcattgcctccatcttcgtcgtgctcatgatacatcagttccgattttcgtttcttggggaggggtacaaggtgcataagcagaggtgtaaacggatcagaggctccacgagaaccgctcaaggccgagacaagagagatcgcaccgcgagcatgacggactccataggcgcacgataaaatgcgtaattcctcgttcgtgttatgagactcaagcgaagtcttctcgtaagcaaagtccttctctcttgttttaagcaagaaagatgccagaacaccacttactagcgtcgttatcaccaaagcagccaccatcatatcatgaatagttgtggtccaccatttctacaggtagattcagacaaagaatgggaaaaaaagaaccataagtttttgttattatatatgttaattgttcgtctgttcttgaccaaaatataccagaccctaaaacatgtgtaacattttttgttgttttgttgtgggtgtgcaataacagacactctacaattgaacaagacttaatgtgaatggtataaaagtagcggaatcatataagtaaacgtaccttttcggaatagttggagtctagaagaagaagaccgacatggcctttaacagagagaatggtgggtaagaaaagccaatatttcttagggatcttcaggtacatacaagcgcttattacaccaataaatttcccagctatggttacaatcacgataataactataccgaggtaaaagcgtttggttaacgcgatgatgctgaatctgaatccaatgtaaccaaagtaaaccggaagaacaaactcgtgaatcgggtaactaagccgttgtatcaacgttctgtgagtctttccttgtcgtggaaacattatgccaatggcgaaaacagaaaccgaggaatttacatcgtaggattcgatagttataccgatgatgagaaggaagatgaagaaaactaaagtttcagcctttgagaggtacttctctttagggttcctctttggaagccatggagctaagaccatgttgatcaatattagggctacggttgccaaaagaaacaagaagagttcaagtatgatagttccagagatgaacgccatgattatagtgtagagaaccacgtttgttaattcgatgaacaacgcacatgagattgtcagccgtccgatctcacatgtgttgagtttccaatcagcgattgaacggactacgacaggagatgccgtgttagacaaggtaacgagaagaaccaagaaaaacgtaaagtaatcttctttgatcccaaacaaagggatgaataacattaaggaagcgaaactgaggaggccggaaaccacgaatgagctcaaggttatcaccgcagctttcttgaaatttcttctcatgaaatgtagatccacttcaagaccgatcaagaacatgaaagatgtccgtaaagcgaaggagaagaaggagtaataatctgctgcatttttctggaggaagaattccttaactttaggtattcttgagagcaaaacaggactcaacacaatcccagcctaaaaaatatccaatatggataacaaaacaaaaacttgttagacattttccactacaaaaaaccgggtgattcttgtaacgcaagaaagaaatttccttacaagaatctgggcaacgggaccagcttggccgcagggtttaagaaggagataaaacaattgagagaagacgagaatgcaagccatttgaataaacatggtattaaggggattaaacagttcatctccttgaggtaagcaaagcaacaactttggatccatcttcttcttcttgattcgatgatcatgagcattcttcaagcgtgatggtgatgatacgcttatgaaaattaaaccttatgttaaaaaaaaaactgaaaatgctttctaaaacaagaatttataattttcacaagtaatttagaaattaaaaaaaaaaaaattagtttacatttggttggagttgatagatgtgtttacaattatttgaacgtccttcaattactctacgcctctatttcaacccttggaaaacggattaagttgactgtaatcagaaattttacccaaaaagtttactataattaggttattatatggtcaataatcaacagatttaacaccataagtccataacatatttcttatcttttgtatatatatgggaagttaatttttgtgttttgtaaacaagtaaaacataatacagatgctagtaaaaatgacaatttgcaaattacctcttagccttacagggtgttgtttaaccaaaagaaaactagagtgttcatggcataataaaaaacaaactataggggctgaactataatacacatactgttcaggatacaaacgaaacatgagaataatatggggtccaaaaagtaaataaataatcaaataggagttctttgcaattaacgctaaagtgcgaacctgtaagtcaaatcatgaaccctaaaaaccccaggtgagaagaacggagagagagagagagatgtcgttcatgtatgagaagagcaatacatggagatggctagtgatgaagacgcgagattcgagatccttcttcttcacgttcgctgctttatgtggtgtcattcctggcgttattggctatggagttatgcaggtcaccaattccagtaaccctgagctcgaagcccgcctccgtaaatctgctcgcccagatactctcgtatgtagttggttttcttctattgatgctaatcggtgttgaacttgatggttacaatttgttcgtacatagttcctatagttgtcttgcttgatgtgtggaacttttcttggaggatgagtagaactttgcttgatgatgattctttctgctactttgcaaagctcctatgggattgggtacctagaggttagaggtgtttaggcctcgatatgttgaattgagcatttgcattttcttgttgctaatacaccaatccattgttctgtgttaacaaggaatttcatgtatctgagttcttgctctgcttcacaatgtcgattcaattggaagtttattgatcacagccgtatgttaaccttaggcttattgttaatcttcaatctttttgtgttatgatgaacaatacatttctgtttttgtattgttagatgatgggtaaagtaaaccaagagaggctagctgaatatcttggtgagttgaaacagaagcaggatacaaacgacagatacgttgctgctcttaggggagagactcttaccaggaagccttatcaaagaatccaaccaatgccaaagccagatgacacggtgacaaccaaaactcagtaaggatgaattattttaagagtcaatgttagtgaatgcctctcactcgaatcttttgtcgatacaaaaatggcgtgtttcctggccgtaatatcttttgtttttgaaaccggcatctagcgacacaacttttgtgctatgcaaacggctacaatgtcaatcacttcaaaccttttgttatgatgaataaaatgtaaaacttatgttttgtaatttgtacattgcttcttcattcttgtttgcaaagttaatgttttacagtacatacagaattacatggtacacgctgattgtggaacattgtcagaaacacttggcaaaccaaattgtagattctacaaaggagatggctatgtgcaagcgatttgttatgtgcagagataaagtttgttggcattgatcacgtgtaaagccgtggtcagaaaaaaagttcgtggccattgatcatgtgtaaagctttagccggttcgtgatccttactcgacagatcgggcaatttgatattttggatccgcaatctccacaagtctgcaaaaggaaaattgcaaaggtaagttaaaactggttgttgattaatgaatgggtttgagtaaactaaaagcaatcggtgaaacttaccatgtggccacagctgaaagccacgtcttttcggttagtcagacaaatcgggcaactctgttaaacggaaaaccatatgagattggagttgattcgacaaggcagaaaaatagtaaagtatacaaattatgagacctgggtttgttcaggtgatgcaggtgatgcagttgatggtagttcagcattagttggaggtgtgtacggaattggtggtggcctcggaactattgtcttcgctaagcccgtctgcttcctttatagacgggtgcagaagtggacagggaccagcagaagcaattagacaaaaaaaaaaaaaatagagcagaaagacggtagttctgttatgctgagaacttatggaagtacccgagtaagcggagttcgatggctgcttgatactgaaagggaatctccattagagcagctagagcaaaagcagtttctttggcagactctggtgagtttctcgtcataatctctgtgaaattcacaaactatgcatagaccagagatcaagaagatgctcaaagcagagaatatagatggaaaatagcacagaaactgggaagatacctgaaagttgtcgaattcacgcttagggatcttatcatcgaacttcctcatgtcttcccatggtccgtctccaacaccgactaaaacaatcgacaaagcatacgagctgtagataataaaggaatttcgaaaaaggcttgtttagataccgcaaatcgagttgcgaaaaatgaaaaactgaatctgcatttttttaccttgcatttacaatcgcgtcgatggttgttttctcttgttgactgagttctccctcggccatatccgtacctctcgttaccttaacattcaaaaggtagccttttaagttttggtatcatactttgtttctcttaactgcttgtaactttacctgtccatctgcaacaatcaccagaacatggaattgtccgttgttcttctccacaatgtcgacagcagcatcgatgagcggtccatacgacgttggcccttttgaacacggaaggttgtgatttggtgataaagctatggaaggtagtatttagattttcaaagaaagacctgatagacgcaagttgggtgcaattctcttgtaacatgctaagacctcttcgaagccatgacatggagaattgtcgctatggaaaccgaacacttcctcgtcatgagttgttgctggatagtgcaagaaaacagagtcttagaaacagagagtgaactgaagatgatatttttgggaaagaaaaacttacaatcgccaaagccgaaacaagggatgagattgtcttcatcaaaaggagccaacgtttggccgattacaaaaatcgccttttcatatggattcgaagtttcgccgagcgcgtgcagacattttccatcgaaagaagttttccctgaaacagaacgttaaccacttttttgtttacagttgcaaaaatatatatgtgaatttaacaataagttgtatttgctgaaggtaccagtccactcgttgctctttgtgaaatcaactccgagaatgagattggatgattcaagaccagcttctcttagagcttttgataccttttaaacaccattcactagttaacactcagtaacaactctccatctctaattagtttccagacaatttttttactcaaaatcattttatgtcccaatgtcaacgaatgaatggaggagaaaaaaaataatcatatacatctattagacttttgaagaactcaaagaacatggaagtagcagaagacatggtgaaccaaaagtcaagtcaacacaagaaattgagagatacaaaaaagaagagaacctggtcgagggaagagaagcggtcagggatgagagcgtacttcttcttggtggcgttggtattatcggcaagggagagtgaaggatccgacggtgatggttcatgagattgagacgacgtcgttcccagagtcatatttctactgcttctgctttttccacttccaaatctctttaagaaattccccatagtcatctcctttcttcttcttcttcttcttcgaattggaattcagattttttttcttctcttgataatggatagaatctttttttttttgggctggaatatttaagaagactactcttcaagacgccaaggaaacatttattgcttcactgttctttataattttattaatttcattctacgcggcaacaatcattacttttctatgtcaaccactaattgttgttatctaagtatttttgacgcggccagatggggacttaaacatttatttactgaacccacatgagttcgaacgaaaacctagaaaaaaattaaactatatattatacactgaagatcttatgagatttgatataaatataggatcattaatgctaaaagaatgactttgtgaacaagatggaattagatactcttcttatgtgctaatctcaacttgcaagttaatttctccatttttgcactcaacccgtttctttacttgaagcttactttgctcaaattaaaacggcagaacaatactgggctgggccttttatgaacgttatgggctatattcctcttcaacttttcctcaagacaaaaactttattcaaattttactcatacatgacaatagcaattgaaatgtggtgccgttaaccggtatgatcaagctggaccggtccagagtttcgggtacatgtttggatctaatctgggcttcacacaagccatcaaaggattagccatgaacagattttcttttgactcgactagctcgactctgtccgtcgtaccaggaggaatggtccagtcgaacccttggagaagcctacccaacaacgtaacaatcatggacgttccaagcttagctccaacgcagccgcgtctaccagttccaaatgaaacaagtcgtaagtctggttcagtcaacaccacttcgttgccggttatatggcgctcaggcctgtagatgagtggctcatcccatgtcttagggtttcgaccaacacccggacgactcactagaatatgactgcctgtgatccacatcaaacaatcaatatattaaagttaataaacaaataaaataataatttgaaagattcgtatgtcacaatctacttattttcacttttcagtccaaaataataaatcaaaggaacaaatattctaatatgaaaatattgctcaaatcaagcaaaaataaatatagttagaattcctgattctacatttaaggagttggagtcaaatacgcctaaatgcataaattttggggaaaaatgagataccttttgggatgaaatagccagcgagagttgtgtcatgacgtgccatgtgagggacaaggaaaggattggtagggtgaagtctcagggtctctctgcaacaagctttgacgtagtttagatttgg

SEQ ID NO: 145 - DNA, 116905 bp, Arabidopsis thaliana
gaattcatccttgtttaaccccgtttggattggagaaacgatacaacttcagcctggatgacctcaaagatgttgccaaaggctacgactgcttcatcaaggaagatgttctttgtacaacaatggtaaggaagagaagtgaggaagacgagttttgtcacactgatttcacgtaagatataagagaaaagatgttaagcttagggggttcaaagttgccttttaaagctccaatatatatagaaccaaattgcatttcatttgctgtttataaaaacagcccagtccaacatagaacgaatccgtgtacactccataatagttatatagaggagcagaaaaaatgactttcaaattaaaaacaaaaccacaaggaacaataagaaaaaagatgcttcctaaaaattgttttcgaaaaggaagaattaacaatatagattttttccgggaataatagcgaaaccagaaaaagaggttccactaggtaaatcaaaaagagttaagaacaaaatcgatacaacaccatctctctctcgtcattcatttaggtactaccttccgcgggattctcagtctccattggttcggcagaagctggttgctctggctcactcttgccctcatccgcctgctcacctcccttggcttgtggtgcctctgctttagccaccggctttggtttggtcattataggcctgcaaaacctgtaaaacatccatagctggttcactctctattatcagatttagcatttcttttaaaagacaaagacacaaggagccttgcttacttgtccaatgcctctgccttgcttttaacgtcagctgacaagagagccggtgtggcatacttgggaagtgtgtcctgctgctgctgctttccccgcagccatgcttctgcttccacacactcgttcaaaaccttaatcatttcacaacaacaaaacatcaaacaatttccccaagcctgagaaatttaagattttttttgtgcttccaagattgagccaaattattaccttttgcttctctgccaattcaatgtgatcaaacttgggatcagtagacatagctgcctctctgtagctgttaatacagtaaccaagctgatcaatgaccgaccctctttccaatgactccttgtaacgcacttcaacagggtcacccacctgcaaaatattaatcccactcctctgttaaaacattatcctgaaatatgatttcttcctgcacaatataaagtgtcatcatatgcatgcattaccttcttgagctcctcgagcttcgcaacataaacacctttggtctcatcttccccatcttcatacaaccaatcctcaacttcctgcagattcgccaggaatgcttccctctccgagtcagtgatatattcctggtatttgtcactcagctgaaaacaagacacgttagtacccaatactcacaactttacatatgcatactgccaatgaaaagacgaaataaagattctcactttgttccgcatatcataaacataagactcaacagcattcttccggtccttggtctcttccataactctgtcttgcaaagccatctcaaattccttctccactgccttttcgacctccacagttttcaaggcaccatagaccaattcagacagtggtacatttgttttcttcaccttcttctttggagcctcagcctgcacaatccattaataagtatccataattatttgatgttcacaagcgaatagcaagcagtatcagttaagagagaaactagcctttgaatcagtttccatttgcaccggcttctcagcagactctggaacaccattgtcagtaccagttgcatcactggtgtctttggcgtcctgcatgtttacatcacagtctccagaagcaggagctgcctcagcagaagctttgtcagagtccatcttagtagtttcctctgaatgttcttttgtgaccggaacttcaacttcttcctcttccaaaagctgcaattaggggggagaaaacaattaacataaattaaaggattcccaagttcataaggggaaggcacgactctagatgatcaatttgtaatcagttactagagagaatgagcctttaaatagttcatgtagcgaaacttacagttgcagattcaactgagacgattccatgaaggttcaatctcactttcactttaagctttgccctctcgccttttgatgactggaacggaccaatctacaaaaaggagatcaaccattagaaacaagagcactacagttatacatagtcatgacattgggagaaagatcaaaccgtgtatgtgctgatttttggaggtgcttgcaaatcgttcacatcactgtactgcacatcaacagagaatgttccagaacgataaaacgttagagccttgacactaggaatgggatttcctttgggaaaaacaatggtgctctgctgattctcagctcctccattttgagcttcagaagctgctcctttccaagcgagagaaattgagaaagggaagctctcatgaacctaagagaacaaaaaataaatcacaatatgactagtcagataatctagagtataaaagttctcgagttgcttacaagtacatgaaaataacgacatttacttaagcgtagatatgcaccaattacctggaattcgcgaactttaaaggtcggactgagaatggcacactgcaaggcacatccccttgacacacactcacttgcattcattgtccgcctgggctccttaccaaaaaactcagttagaatcttgatcatagcagggacacgagagccagagccaataacctcaaccatatgtacatcttcaacagtgaggcctgcatcagagagagctttctctagaggcctctttacacgctccaaaatcgggatgctgatctcttcaaactcttccctcttgatgacacccctaacatctttctcatccatcaaacactcgatattcaacggtgccagaggattagcgcttagaacctttttcagtttctcgcatgtagcacggagcctgagagaagccttagcattctgggagacgtcaatcttgtactcgtccttgaacttagcagcaaaatgattgaaaagaacttcatcaaagtcccttcccccaagggagcgatcgaaagcgtgagacaagattttgagctgtccttttttaaagcctgcaatacagacttgcatgcttgcgtgtccaatgtcaatgaatgcaacattgagctggtcactctctggcaaatctgtcttataaataccatatgccaaagccgtagctgtagtctcgtggatcaagcgcaagggatgcaagccagcaatagtggcagcatcgagaacagccctacgctggaggtcggtaaagtaaacaggaataccaatacagcagtcgacaacagctgtattcaaattcttctcggcaatacctttcaggttagacaacatcatgcccatgacttgagtcggggtaaaggctcgcttctctcccaaataattagcatgtatcaaaggatagccatcagggccttcggtgacagaaaagggaagggatttgatatccctttgaagctcagggtcggaaaactggcgaccaattaagcgcttaatttgagagatggagtttttagggttcatcatggtagaagcagctccagcagtgccgatgaagcgctgcttgtcaccgaagcagacaatagcaggagtctcacgattggactcatcattaagcacgacgtcgatacctctttgcctcgcaacggcaacaaggcaattctcgtttccaaaatcaaacccgactacactcattgtcaggctgtgttattcaataatactgggggctcccaagtatttgatagcaaccttctcagatcaataaaagcaaaaaaaataagtatcagatgaacaaggatggaatatcaatgaaagcagactaggagaagactaattggtgttaacacaggtcagataactagtcttattactgaacctaaatcaaatcaacattttagattacaatcaccaatacgggagaacacgcgagccattcatacaaatagatcaaacctaaaaatcaaatctacgaaaaaatagaagaggagcttcagatctggaagatctgggaataaagattgggaaacatacctggatcgcgagaggggtttaaagttatggaagcttgaacccaaatctgggttttatcgtcgtagagagaaaacgaagagcaggagaggttgtcgtaaggaagagacaagagagcgagaggggtttattaagaagcccccagggttgcgttcctctctacttttccttttttcttttcacactttcttttcctttttttttttaattactacttttatgtccttttcttctaatactatatcttatgatatttatttttgcctctctttcataatttacgtaaacaaatcgagtctacaaataaaaattatcaaaaccaaattaatacatttgcgtaaagctcttccgtccaaaaccaaattatttataagttgaaagattatacaactaactttgtatgcgttaatgataaacaacaataataattctaaactatttgaaaaatattattagctagtaaatgatttctgagttggattttttcgagataatgtcactgtttactggcatttcaatcctactgttgcaaaccttattttgtgaaatattcttagtgtggacaaaaatcttggatcgtaatcatctagtacagtactttctaatcgtcaattagattgaagaactatattaaatgtttacatatatttttggtatcacttgcttctttatttgcatctttcctacctgatcttaagtttactcggtttaaaactactgtatatagcaaacttgcaatgacatgcaatatgctatgattgttttcttttgttataaatgttaatatcatatataaaatgaaagaaatgtattacaaaagagcattaacctaatcaccagattgcgaaaaccttttagatgtcttcttgaagatatggtattgcaaatttcacggtcaaaattcttgaaaatgatcgaagaaagcagtgactgtgaattatgtaagacattatttacttgttttcaaatgtggtaaactccaccgtgtgctgccatttttttgagagtggaaggaacatttggtgaacgagtttttgtccaagagagaagctcaaactatgtggaaggcatatgcgtgtgctgccagtttcttgagagtggtaggaacatttggtgaacgagtttttgtccaagagaaaagctcaaaccatgtggaaagcatattcgtgtgctgccagtttcttgagagtggtaagaacatttggtgaacaaaagctcaaactatgtggaaggcatatgatgcgagaaatgcttaaccgagaaaaaaattagcctccaaatctcacaagcaaaatctcaagttaataagcattttagcagtggtgtctatgtacaacaatatcataatatgaaagccagtaataaaatttaaatggtatgaaaaacgataatagctatataataacattttctttgtttttaatatctatattttgttttagttatatataatattaacatgtcaacaaagttttcaaataactgattatttaatataatcaaaacaagtaaaattatacgatatttggctagatttaaaacgactattttagtgaatcgaataaccaaatcataccaaactcattcaaaatcattattagctttcgttacagtagataaaaaagtattggtaaccatgctcttataaatttaattgaattagacagtttatgattaaatcgataataataacgaagattgatgtattttgcaagtagaacaatttatttctggtcgaaatataaatagttacaacaaaacagttttcttaaaatcattaaatatttgttttgtttaaatctctattttgttgtaactatttacaatctctagatcacattaaatctctagaacatataagagatttgttgcaatccctattacaatatctggatcacattaaatctctagagcatataatccctctttgatccatatccttttctctttttcctttctaatttataaaaaatgtgattttttttgggaaattcgttttcgttcaccataaaaactttgctattaataattactctaatttaatggaaaataaataactcgtaaaaatgtaaagagagaaatgaattgcgaaatattttaattgagaaggtaaagaaaagtgaataagcaagtaaagaagaaagaactcaccaatcagaaatcagaaattagaagagaagagaagcataaagaaaaaaaaactgcaacgccgtttgttgccgatctgcagcagcgcgatctctctgattatagagagctatcatcctaggtgagcttcttcttcgatttcctcttctacaatatcctttcaagttcgatttcatcttctttcaccaattattggttttgcttccttcccgtagtttcgtttgtttgttttctaaggttttgtgtcgatctcaaagtgagtccagggattcatatacctttagactagattagccgagatctattagtgttgatctccgtcatgtagaatccctaattaatttcagtggcctcagatccagcttttcatgttattgataattttgtatccttgaagctttttggatgttgtgagattataacagagcttttcctttcagcagaatagaatctctcagtttaaaggctccaaagatggcggcgtcagaagagaatagcgcattgtttcccatttttatcttgacgattatggcaattcctttggtgccttacaccatggtcaagttaagcggtgctctctccaagaaacaaaggaccattcattgtcagtgtctcgagtgtgaccgttctggaaaatataagagatccttgtttaaaaaggttactttccactcaacctcctgctctgtaatagattattgcatgttcctaacctcttcttcacttatctatctgcagatctctaacttctctacgtggagcaacttgacacttgtgctactctgggtcgtgatgattttcttgatttattacactaagaacatgagccgtgaggtaatcccattgcttgctgttgaacttgaatgcaccgctgacttatatcaactaattctacttgcttatttaccttcttttgtgttacaggctcaagtttttgacccattcagtatacttggactggaacctggagttacagattcagaaataaagaaagcatatagaaggctgtcgattcaataccatcctgataaaaatccagatccaggtcaagtttttccccttgttattttttttttcccttttgatcattacggaattatggttgcagcttttgatcctgatagttttttcttctatgcgcatttgttgatctctacagaagccaataaatattttgtggagttcatatctaaagcataccaggctttgactgattcagtatcccgtgaaaactttgagaagtatggtcatccagatggcagacaggtaaggatacatctcctttcccttcgcatgtgctcccgtcttattgacaagcctattgagactaaaatattgttatgtgatcgcagggatttcaaatgggcattgctcttcctcaatttcttctagacattgatggagcatctggtggcatattattgctttggatagttggtgtctgtattctcttgccccttgtgattgctgttatatatctctcgaggtcatcaaagtatactgggaactacgttatgcatcaaacactctccgcatattattatctaatgaaaccctctctggccccaaggtatattcactcatacccatatacattcaagtgatgctattggtgcatgacaaatgggctgtgttttcgtttgtttgtatgacatgttttaaaatttttattgtccagcaaagttatggaagttttcaccaaggcagctgagtacatggagattccagttcgtagaactgatgatgaacctctgcagaagctctttatgtctgttaggagtgaactaaatttggacctgaagaacatgaagcaagagcaagctaagttttggaaacagcatcctgccatagtgaaggtgaattttaaaattatgcaactgtaatgctaaatattggataaactgaaatactcacttcctcaatttctgtacagaccgagctgttgatacaagcccagttaactcgtgaatcaggagtcctgtctccagcccttcagggtgatttcaggcgtgtgctagagcttgcacctcgcctccttgaggagttattgaaggtctagtctctatttaaataacacaatttctgataaaataaccatcaaaaagcgatgaccgcaaagtgctaacctagaagatatgtattttcctttagaggaactcgaaacagactcttaaaagacttagaaatttaggttaatagtgatgcttttggttacactgttaaattgtggttttcttaaccattctttcattataacattgtgagtttcttgcagatggcggttataccacgcactgcccaagggcatggatggctgaggcctgcagttggagtagttgagctatctcagtgcattgttcaggtcttaaattgctctcatcgcctatcttctagtttttatttgtttgtgagctttcagttctttatgtctcttttctccacaagatttacttcttcctgaaagtttaagaagtgcttagtgttgttgtctaggaacataaactaaaaatccaaaatcgcaggctgttcctcttagtgcaaggaagtcttctggagtatcatcagaaggcatttcccctttcttacagctccctcatttcagtgatgccgttgtcaaaaagatagcacggaaggtatactactatcaaatgtgtcaagtgcagtactaatatctagttccatatcatgtgcatttttctctcactttttgattcctgagaatcttgttggattctgttctccaaataagtagtagtggttctttaggttggtttacttaaaggtctagtctaaagacatatataaacctccattttatgttaacatgtcattgtttctcctattttcagaaggttaaatcattccaagatcttcaagaaatgaggttggaagaccgttctgaactacttactcaggtagcgggtttatcagcaactgatgttgaggacattgagaaggtgctagaaatgatgccgtctattacagtcgacatcacatgtgaaacagaaggggaagaggggatccaagagggagacattgtgacccttcaagcttgggtcaccctgaaacgacccaatgggcttgtaggcgctcttcctcatgcaccctacttccccttccacaaggaggaaaactattgggttcttctggctgattcagtgtcgaacaacgtttggttctctcagaaggttagcttcctggatgaaggtggagcgataacggctgcatcaaaagccatcagtgagtcaatggaaggttcgggtgcaggggtgaaggaaacaaacgatgcagtgagagaagcgattgagaaggttaaaggagggtcaaggctggtcatgggtaaactccaagcaccggcagagggaacatacaacttgacttgcttctgcctgtgtgacacatggatcgggtgtgacaaaaagcaagcactgaaagtgaaagtcctgaaaagaaccagggcagggacacgtgggttggtttcagatgagggtgcgattgcagaagaaggtatggaggaggaagatgagattgaggaggaggattacgatgatgattacgaaagtgagtacagtgaagatgaggatgagaagaaagatatggatgagaagagagggtcgaagaaggccaatgggagtgtgaaacagaagaaagagtcgagttctgaagagtcgggatcggaggaagagtgaaacagaaatgagattttacattgataaacaaaacaaaaaatacaatacttttgtcctggaatcttgacggaaacttctttttcacagttttgatattctctcattggctcccttctctttctttctctctgtatcacttttcttcagagacacacatacaagcaaaacgcgactaaggagaaaatcgtactaactcggacaaattttggtacacagcattacaaaacaaaacaaaactttttaactcccccaaatagtttagggtttagggtttattgggggccccaatacagaccatcaggtatcaggtaatgggccttgttaataaagtagtgggttataatgggctttacggttgtttcaagaagtggaagccctacaaggcgggaaaatcagaagaggcgcgtctgcttccgtcttcttcttcgtcttctccggagaggttttgtggtgttatcggcggaatccgacccgaaaatgccaaattacagcatcagaggaatcaatgttgaattcccattcgaggcgtaccagtctcagatcatatacatggacagagtcatcgagtctcttcaaaacgtgggtttccctctccctctctctctctctcttttttacacaccaactctcttcaactgttttgttgatgatgatattcgcgtgatgatactctctctctctctctctattctgttgtttattttgctttccccaattctatatcgctttttagggttcttccccgttcacactgaccatttgggttcttaaattaacgctgaattagttgttaactaatcttgtttataacttgtgatgatgatgcagaaatgtcatgcgcttttggagagtcctacgggaactgggaaaactctttgtcttctctgtgccaccttagcctggcgaaagagtctgggctctttctcaacccgtaaggatcggaagaacagtgccattccttggtccgattcagacgagcctctgtcacaatccggaggaggaggaggaggagcttttcccaccatagtttatgcgtcccggactcatagtcagctccgccaagtgatcaaagaattaaaaagaagtagctacaggtcggacacaccacaaattctgtttctgccttatagctacctgctcatcatctcttctcaatcaattttgtaggcctaagatggtggtgcttggatcacgggagcagttatgcgttaatgaggaagtcaactccctccgtggcaaagcactcactaatgcctgtcagtacctttgcaaaaagcgcggtaaacgccaatgcaaccatttcaatcgccttccaggtacacagccatcatcaaacgaccatttataaatccttcttctttatgaattatggttactatttttccctttcctttaatcttttgtagattatttgaagcataaccctcatattggcgacgaacctgttgacattgaggatttggtcaatattggaaaagattctggaccgtaggttcctctattttttttgctacttcaacaaatattttcgtttcttacgttcctggctttttccatctgtgtactatatttgtatttttcagatgcccttattatatcacaagagagcttcacaaggacgtggacatcatatttgcaccttacaactacttgatcagcaatgggtatagaaagtttttgaaagtcaactggactaatagtgtccttatttttgatgaagcgcacaatctggtaagggactaatgttgtttcacatataatttccttatgtattctctgttcatcatgaactcttcgtttcttggggttttgttctatttttccgggttaccaaacgattatactgcttccaacttctcgaaacactcagttcatctttaaaacatgcgcaggaaagtttatgcgcagactctgcttcatttgaccttccttctgttcttttatcggcttgcatttctgaagcgcaagaatgtgtacaacttgcggcagcaagaagggattcattaaatgacgtttccataaaccctgagaattttgctatacttaaaggtcaaactttaggccttgactgagattacaacgttctgttatacatgaatgcctgttctcatctatcgttgtttttctcttgcaggactgcttcttaagctgcaggaactgatttctaaagtgccaattcccaaaagggacgagggatttaccaagcctgggccttacatatatgaaatgcttaaaagccttaacatcactcacgaaactgctcctaaactcattggtacagttgaggaggctgcagtgttcctggaggaggaaaaacaacgaacagcgaccaacgctggaagcaaactagaaatcattgctgacatgcttaagctgatctttagagaaaatggaagtaaccatgcagatgtttatcgtgtaagttttaagaagagtgttgttctttatattctgtgtcgaatttttataattaagttgaaaagaaaattatctttctcttacaccatctcattcgtcctttgttaggttcatgtacaggagctggagcaaaattctactgatgtgatgaaaggtaaataagagtgcgattttctaaagcctttaaaacaaaacattgttgctgtcccaaagcattaacaaaaacgccgttttgctaatttgaaaacatagtaatcattcttattctgcttcccctgttgaaactggaaacagtgtcttttgaaagattagtcatatctttggaggaaataaatgaatgatttattttgtaggcaaggtatcaagaacgcttagctggtggtgcttcagtcctgggattaccatgctggacatagcacaaaaaggtgttgggtctatcattttaacatcagggaccttgtctcccatggattcattggctcaagaactaaaactgtgagtcctatcgctaatgttttctctcactatgattgtctatctgccttttcccccagcttataatggaaacatctttttttggaaaacgcagggactttcccattcggttggagaatccccatgttatatcctcaaatcagctatgggctggagttgtaagtactggtccatcagggtacgttcttaattctagctaccgcaatcgtgatgtcccagagtacaaacaagaacttgggaatgccataggtaagtgttttgttatttggtagttcatattggatggcctgaatgtatcattctgaatttctgacctgtgaaccgagttctagagtctggggagatctcaaaatcgaagctgctatccttatagtgatcaattaattagtatgtgtttctactctgcagttaacttttctcgagtcgtgcctgaaggactgctgatatttttcccttcctattaccttatggactcttgcattacattttggaaaaatggggtatggccgttgttaattttctcttaagtatgaaaaaatgagtactctttagcttgtaaacctaccgttttttcatcattcagtgttacagaaactcaatgacagtatgggaaagaatttgcaagctcaagaaacctgtcattgaacccaaggattcctccctctttcctgcagcaatgcgggtgagcaagagatgcctctgatctacgtctcttgaataggattaatttaatcgtgtcttgtatttttgttaatggtaggacttttcagaaaaattgcaagacagagcaacttcgggtgtggtgttttttgccgtttgtcgcggtaaggtatgtattcttcaacctgtataaattttctcctgtatccatatagtatgtatgaggatgctggtataaaagataggaggtcaataagtttctctagtgtagtgtcttcagtatggctggtctctctgttgtgttgtcaggtcagcgaaggactggattttgctgacggtgctggcagagctgtcgtcattactgggttaccttatgccagggtgacagatcctagggtttgtctgctctatcctttaatgttttgttctgaatttgtatttaggctcattagcgaaatggtagcaaaaaacagttagtgaactgttttgttctttttcagagtttctttctcatttctcttcacttttatttaaactggcactggggggccacatagctttaaattttatgctgctacttgtattccagcatcattaaaccatgtgtaaaacaggttaaattgaaacgagagtttctggatgaacaatcacaacttgcagatgttaaggtgagttcaatatttatttgattattgacacatcaaggtataatatttcttacaattttgtagcttccaagatcaaccctactatctggaagcatgtggtacagtcaagaagccgcacgggctgtgaatcaagcaattggacgtgtaatccgccatcgtcatgattatggagctatcatcttttgtgatgacaggttttgttcatgctacccgtggctttttttttctggtttcatgcaagattgttcttttcgagcatatattctgggcatgatgcatgtaaagatgtaggcctcttgtttttgggcgaatagatagtgcatgaaatattttagttaaggtactgccaatttaaattgagacgtatgctctttatttgagattgcttttggttgatattgtgtctgacattctctttcctaactttacttgctatagttcttaactatcctccaaaagacaatatactcattctcgttttttctgattatttcgtatattggctattgttgacagatttgaacaaccatcccagcaatccaagatatcactttggatacgacctaacgtcaaggtataagttatgctctgtcttccctctgtcttattatggagagtaagtttgtttctggatataccggttttgcagtgctactctagatatggagaggttatttctgaccttgctcgatttttccggactgaaagatcaaattttcctgcaaggcttgtaacagaacaagagaacaatataggtaatgcatcttgcagccaaaagataactttaattggacgttaccatatcttagtctgcctgccctattatctcccatcctgtttttttccttgtgataatctatgggttgcgtttgggtgtcggggaatgatataattgcttatcttgtatccacaagatttttgcttaataggttggaacaaaaccaaaaaaagagtaaatgaatagtagtaagcatatatgcaatagtttttcatagcaaaatgctcgtattcttcaagccctattttcaattatatgttggacatccactggtaagccaaatcttttttcgatacagtttcaacattgttaccagtggaatcaatcgaggataatcctacaccagcctttggtcagtgattcattttttcctttattctcaggtctgaggaaagatgttttccctttagtacatggttagaatatggatctaacttcaactctctatgttgtgattttgctttggttattgatcatttgcaggtaatagtaatttgaaaaacgttggggttgcacaaaatgagttgagtagactggaagcgtttcctcctgcaaatcgggcttcacccttggagcgtgacggaaataatgttaaacggaatggtttgaccattcttaaacatacaggcaagatacctcgcattgtaaagggagatgttatgcagggttgttcttcacggaaggctaagttggtggaactaagtgatgatgaggagactccggtagagaggagatgtgaagtagtggatctagaaagcgacaactgtgagacgcagacctgtgtaactgaagtgcttgcatcaagcacatgtttgaacacaatgggactaaaaaaaaagcgaaaggttccagagagtcagggaagtgcatcgtcgtcagtgttgacagcgaaagggaatggaggtggtgataaaaaggaagcaagtgcatctgcgtttttgagtcaagttagatcctaaaccctctatttccatgtttctcttttgtatatccagttatttgcttacattggaagacatgcggtgatgatcttactaggtcaaagagaaactcaacacagaagaatataagaagttcattggatacatgcaagcattgaagaagaaggagattaagttagcaaacgtgatgcagtccattgtgcaactgttctgtggaagtgagagggatcatcttctaatgggattcaaagactttgtgccagtaaagtatcgtcctgcctacgaggaatgcattaaaacgagaaaaagacaatcgatcatctttggtaactcaaattaacattgttactcgctcttcattctttttgtaagtaacaacaagtcaacaacagccttaaggctgctgagaagaaaggaaggaaagtaaaacttttttgtgacaaaaagaaaacgaaattgcatgagagttagttgtcactcatgatcatcctcttcctaagcctgtccctggcggcacgagtactgagcgacctcacatgacctttcctggtgattctcttctccttctcacgaagagcaatgatgagatcgacgaaagcgcttagtatgaacttgtgtgacttcttgtcgttgagatccagatagcagaagagtagctcttccatcaagtcccaatccacttcgctttcccgcatccctaacttggactccatcatctccaccatggactgcctgaaatcctcttgcggctcatccgtgtatcttaacaccgcgatgcagttctccggcagcaccaaggtggatctcgattgcctctccgacgatgttgacgttgtttccatgctaggcctgccctccgaagatccaggcggaggagatagcctctctgttctcagcaaatccgggggctgtttcggggagtcgtagacggcatgtccccatgtcctctcgaatctgtgacgatagtcgtcgtcatcatcatcatcatcactgtcgtctgatgatgactcccttttctccttgtttttggtcacccgggcttgatgctgatcatcctcctggtcgtctctgatgcagagggatttgaagttttcctcaagaaaacgatcaatgtcggacaaggtggcggcgtgagcagagtcctggtggtaaacgggttcttctttgctgaatctggtcttgctgctgcgtcgtctgtgcttgaaggagaaggagagcttcttgggatgcttaccaagcacccaattctttgaggatgagaatgaatgtgaggaagacagttgcagcttccctgtctcttttttgatctttgacaggtaaccatgcagcgatttctgcaatgggtttggcatgtcctctcagacttttgctctccaaacaactctactgcatgaaaacaaactcagaattctttaattttaaaccaattcttggagatttgatgctattaagagggaacaggggttcattggtcaaatctgaaactgttcaacgctacgttgttggtaatctcattaattaataggcaagtttttttcttagatttgtttctgtgttaaatctgtttccattagttccagattctgcattcaatgcatcgttgaatagtaattgttctttttttttgtattggaaatgaagctcacgcgcttaatctaaacacagagttgatgatactgtacttgagtcaattcaatgtttaaagtaccaattaaggtatcattgacaaaaaattaaacatctttaatagtgaaaacaaatgaagagaacccgataaagcggataattaagtagcaagtgtttccgaggcccatattttgaggcccaaaactggagtataatggtgtgcgtctattttgtcccacatcgcttgtgtgactttagagcacaaaaagctagtgctataaaaaaaatctcacatcctcaaaagctagtgctataatgacgcagctaatgaggtactaaccgaggcgcgtctattgctggttgaaaactatttccaaaccccctcatgggcctgggcttgacctatggcctttgagaatttctggaagggctcccttcggggtaaagccctacaaatcttaagttcaaattgtttctatccttggtaagttatattattaatatagggtttggtcattgtaaagattgagaatcgtaatgtatttgggggagtcaaattaaatgtatttgggtgagtcaaattaggtgaattctcaaaaggaagaaaatacgcataacaatctgaatctgtaactataataaaattgaaaacgaaggtatttgtcttttcaattctctaaagttgttattcagtatttactttacatttcagcgataagggaccaaatcaattggttggttggaaaggtaagaaagatccctaaacccataaatcctatttccaaatcaatatgtagacataatgtaatcagcactgtgttgactgtttaattcttgtttttttcgttttatctggtcattgcaaaagtgttaattaatatattcattacagatttttagtggatttagtatatattcttttgataattattttcttacgcctataatcacatacaatgtctcatataatttgtatttattatttttaaaaagttctgataaattggagaataaaaaacaagagttaaagcaaagctttgttgttgttttttctgtagtcaacaaatattgttctctttttttaagaaaaaaaatgaaaatgaaaagacttgataagtgataatgggagacacgatcactcgtaggcgttgcttccggtttttatttctaacatttttctactctcttttttttttttttttctcttatggaaaataattttgtttttataagaggaaaatacagaggcaaggcaaacaatacgagtcttgtacgtattctctctttgcttcctaaaaatcaatcaatcaatcaatcacagagtacgcaccaccagccaaattataagtgagagagaagataacgacgacaagaagaagaaggagaagctccaaaattgttcatttgcatttctccaacttgtaaaatcgagcacctgcatttgggggctttcctcttatctggaaacaaagagagccgccactgatggtaaatttgcttttcatccttaacctctctacttcttcttcttcttcttcttctactaccactactttttgagattctatctatctatagtcatccattttgactaggagactttatattattttcttcatttgaaagattctctatacatagatagtcatcgattgtgtttctgtgtgtgtctgcaatatctgtagttttgatttgaaacttgcctgaatcaaatccaaccatgaattcggtagttttgtagatcagagattattggtagagagtatcaatgttggattgattgattgaatgaagcatacattattatataacacaagatttttataaattgctactgaaaccagaaaaaggtaaaatattaatttgtgtatttttgtaggaatgagtttccgtgaatcatccacccaggtgaaaggaatcataatttggttggtcaactaataataaaaatgggtgaggcaagtgattcagattcgtctgatgagtctttgaaacacaatagcaccccaccactctttagcatctctggcttcttttgtgttgccaaaggaggagactctgatcccggtaggagccctacttctccccttgattttggagtctttggtggcctctttagccccaggtcttcttcttcttcacccctccaccgaaacaaatggctttctcacaaagtcgggctttctcttctgagctccagcttcgaactaggcgatgatccattcagaagggactacattgtgcttgcccctcaggtcaaggtcaacaatgttaatacagcaactcccaagctttccagtgatccttgtgtcattgtggaggaaccaaggagatcaagctcatcatcccctatggatatcatctccacgtactctcgctccctctctgggcgtgagatggctctctctgaggactatacctgtataatttctcatggaccaaacccaaaaacaacttatatatttggcgattgcatcctggattgtgaccccaaggacttgggaaaagaagatattgagatacacgaagaaggggatgattcttttagcacagaaaaacctcaaaatcacaggttcttctggctccaacttacaaagcagcattgagtggtctttttaaccttgaactaattacatctctgacattttatttccgtgaatgaacaatagggaagtatcagcagaaaaggaaagtgagaacgctggtgctgaagaatcatgttacgaagaggaggatctgtttcctatggcaatgcctcttaacccgtaatgagatggccagagtgaagggggtttattgtgtgggcctctccctctttgagtgtgacatttagtgttgtaaggttaggtgtggggatttttgtgtgctcaataaaaagctttgattcgggtgagttttgctgtggcctgatgccccggctcatcccttttcttcgtcttgttttttttttcttcttactttgtatgattgcgttgttactactgatcctcatttgatggacacacttgtgttttctctctatatcaattgttttagtggctcacgttgctgaataaaaatggatattatcgatagggcatcttttattctattttgggatacaagaatgattgaaacacaatattggaaagaaaagctaagttgcaaaaaaaaaagaaaaaggaaaaaaagtcgaccacagtgggagtcgaacccacgaccttttgatccgaagtcaaacgcgctaatccactgcgctatgcggtcattcttgttacttatatcatgaacaacatggtaagccaaaacttcttctttcctctttcttctttctgttttctggtcgctcgttaccaccaagacctcgtcgaggtttctctctctctgaaaaagtgcttttgctgcgtttccatgctctcggaaggaacttggctgaatcgttggagaattatcgatctggcgtcgttggtgcatctctagctgcgccaattcatcggatccggtttgatttctccctttcgcgaatctagccttccgtgatcttaggtgggttttccgaattgatctgtaattgaggatgtaaatcgaaactagggatttcctagatctcgttagctgtgtatttgattattgcagcagagtttttgtttaggtagagatatagggaattttgatatagggacacttaaattttggtgtatcaatttgctgcagcagccatgttctatggcacagctgtatgggacccttggcttatcgttggccagattatttgcctccaatgctcttactatctcactcttggactcttcaccatggtctttcttggccttcgtgttcctcgccttagtcttgtctacttcttcgattacgctactctcactacttccaccttcaccggttggtctgttattgcctcattcctcttctcttcactcgctgggtattttgctttgccccctagtaatagtatccatccatttatttccctctttattactagtcttttcagattccttgtattcattttaattggcagggctgtgtacatgatatttttggtggagcgagcacggaaatgcttagatttctctgcaactctctacatcatacatctcttcttttgcatcatgtatggaggatggccttcctctatggcgtggtgggttgttaatggaaccggactcgctgttatggctttgctagctgagtacttgtgcattaaacgcgaacagcgagagatccctatggatcgcttccactcaagtaagatgatcattctttcttgaaatctctctgtgtgaacaagcatatctttaccttttactttctcaagactgacttaacatgaaattaaatttggctgcctatgctgctgctgcaggggtttgaagattggtgaaagaacaagtgatgaagattcttgtgggttagcagcgcgactcgtagagcctagtagagcctagtactcttaacaattgtgatgtacagagatgaaatcagaggagtagaatgggcgaaaggaagttcagctagccaagcaacaatgttggacactggtgcaccaactctgactgcaatttttagtgacttcaaatactaagactttggaatacgtttcaatttgttcttttgtatgaaaaaaacattagactcgaataggttattgatttcatgttgcttcttttttttgtttatactggattttctcttctatcctctacttggtgcagctttgtgtgttttaaaaccagtgtctcattcatcatactcttttaccaccaattgaatccttccaatttactgttttttgggggggaaaattactgtgtactaacaagtaaaaagggccgtccgtcaaaatgtaacatctcctatatacggtgcggtcaagttaaaaaaaagagcaaaaacgcgtgataaaacgacgtcgaattagagatcctactagacccagattcagatccaaatcgccaacgcgcactggaagtgggatcaccaccactgcgcttcttcttcttcgtcatctctgatcccccctgcgatcaggggccatttccgtcgataatccgatctccggttcagacattcgtttggacttgcaaagatggtgagtgacatgatctctcagtttctccatagatctacctctgaatcctctttcaattttttacttgaaatctcatttctgggctagtctacgtaagagtgttcctcattgcactaaaatttgatgttccttcagtcatcccctaaatcgaacgatattttctactatgccgtgttttggtttctcagaatatcatcaagtatttttgtacgagctatttttttttttgtttctctcttcggcactaacctaagtgtttgcttcttttgttgacagccactgagactcgaaatcaaggtaatgcagtctcctttgatgctcgatttcatccttaatcattcttattcgggactgtattgacacgcttctttgttttgatcagcgtaagtttgctcaaagatcagaaagagtcaaatctgtagatctccatccaacagagccatggtaatttgagcgcattcattcttcattgctttatatatcgttaaggaaacaagtactaatccatagattgtttcaggatcctggcaagtttgtattccggaactctgtgcatctggaattaccagacccaggttagtatcatctcttgcttttatcttactttctatctgttggtcttcactcttatattttgtgctcccttctgattattgttaacccaaatatgacttttgcagacaatggtaaaatctttcgacgtgactgaattgcctggtatgatatatagcatctcattgttccttcttattctttcgcacatcatttgttgaatctctgtcctggtgttgtgcagttcggtcagcaaagttcattgcacggaagcagtgggttgtagctggagctgatgacatgtttattcgtgtctacaactacaacactatggataagatcaaagtatttgaggctcatgctgattacattcgctgtgttgctgttcatcccacgcttccctatgtcttatcatcatctgatgatatgctcatcaagctctgggactgggaaaagggttggctttgcactcaaattttcgaaggccattcccattatgttatgcaagtcactttcaaccccaaagacaccaatacttttgctagtgcatcccttgaccgtaccataaaagtaagattagtcttcaacttttaagttacaccttcttctttcattcccaatttcccattatgagaagcttaacatttgttttcctgtatctacatcttttcttacctagatatggaatcttggctctccggatccaaattttactttggatgcacatctcaaaggggtaaactgtgtagactactttactggtggggataaaccatacctaatcactggttctgatgatcatactgctaaggtctgtactgagctttcttgcttctttgcaagttgtttgctacatatgtgtgcttgtatgtatctccatttgtattgtttgtatataggttcgtgcagggttttctgtttgtatattgttcataaatttcttctggaagcaggtgtgggattaccaaacaaagagttgcgttcagactctcgaaggtcatacacacaatgtttctgcagtatcttttcatccagagctacctataattattacaggatccgaggatggaactgttcgcatatggcacgccaccacttacaggtaactcgtatgctgtctgcattggagctgctattgattttgtctttaaaaacttccttcaatttttcaaaaatcttcatccaacagttttttacttaatacttgacatctaggcttgagaatacattgaactatggccttgagagggtttgggctattggacacattaaaggttcacgccggtaagtttctgatcttttactatgtcaatatttattccctattaaagatatatatcttcacatcataattatttctttgtgtaaatttatgtttccttcataacttacgagatggcaataccttgtctttttccagggttgtaattggttatgacgaaggatccataatggtgaaacttggccgtgaaataccagtggctagtatggataacagcggaaaaattatttgggctaaacacaatgagatacatactgtaaacatcaagagtgtgggcgcagatgaggtttggggtttaacacttttacattgttgccttgtgtatttgaaaattagctcatgtttggcaatgtttatcatttggttctgagcctacttaggtcactgatggtgagagacttcctttggccgttaaagagctagggacctgcgatctttatcctcaagtaagtggcatccttcttattgtataattgttactccctttaaacaatgaaggaaatgtggttttgtatctctggattgtcatttctacatttatggaagatatattggatatgtagtgctaatgtttttcttgaattgctgcttcctgcttctagttatttatttttgggcagtttgatagattactggtattagtaagaaatatgaccttaaatcatttattaattttgtgactacccactgtcatttatgtttctattatttaattttttgctttttcagagcttgaagcacaaccctaatggtaggtttgtggtagtttgtggagatggtgagtatattatctacactgccttggcgtggcgaaataggtcatttggctctgcgctagaatttgtttggtcatctgatggggagcatgctgtcagggaaagctcgacaaagatcaagatcttcagcaagaatttccaggtttgtaattccttttggcacgttccttttccgactgattaactctaaagcttttgttttttgtgtcttattctgttatctgaaatacactaacctatgctgatacccttgtttaatttgcaggaaaagaagactgtgagacccaccttctcagcagagcacatttttggtgggacgttattgacaatgtgctcaagtgattttatatgcttctatgattgggcggaatgtaggttgattaggcgaatagatgttactgtcaaagtaagtgcttatataccagaagtagatccattagtttctacaagaaaatagtttataggttacgttttcagtaatatttttattggagaaatacaaaagagttccttatctgaaatttaaacgcaaaagcagattggtactgctcgcttattcacttttaacgtttttgtttattcaatgtttcagaatctttattgggcggacagtggtgatctagttgcaattgccagtgatacatcattctacatccttaagttcaatgtgaggatcttttttaaaccttggtagtgagccagaactcttgtacatttccttagtttattttcctagtactgttgctgttcgagacatggttttaagctgttttcttactgttctgctgtagcgtgacattgtttcctcttattttgatggcggtaaacaaattgatgaggaaggcattgaggacgcatttgagcttctcaatgaaaccaatgaacgtgttcggactggcttatgggttggggattgttttatctataccaactcttcttggaggcttaattactgtgttggtggtgaggtaaggctcatttctaggtttttggaaagaaacgttttatgttttttattttgttgtaattgagattcagtactcctcttatattacaggtaactacaatgtatcatctggaccgtcctatgtacttgttgggttatctcgctaatcaaagcagggtttatttgattgacaaagagttcaagtaagcagatgttttactgttatgattgctaacaatgttttgtaacttactgacttctgtgtccactttatgattacagtgttattggatacactttacttttaagtttgattgagtacaagactcttgtgatgcgtggagatttggaacaggctaatgaagtcttaccttcaattcctaaggagcaccataataggtatgagaatgtgctttccctcgcattatggttacagctggattatggtgttagtaaacatgtatccaaggtcacataatggtttaaattgttttcctaaattcacgcattcctacttttctgattctcgacttcaaaatcctgttcgttttgtcagcgtggcacactttttggagtcacgtggcatgacagaagatgctctagaagtagcaactgatcctgactacagatttgagttggccatacagctcggtagattggctgtcgcaaaggttagtctgtagtttttaccatttgagaagctttatttccatgacttaccgatatgtttttactcgattcttattttttgacaggacattgctgtagaggcacaaaatgaatctaaatggaagcaacttggagaattagctatgtcaagtgggaaggtgaccattttttagctgcaatcagtgttctaggattcttacaaaggttaaagctaacatgtatttttcttttcattttccttcccatgcttggactacttagctggatatggctgaggaatgcatgaggcatgctatggatttgagtggtctgctgctgctttattcttcattgggagatgcagatggaatgatgaagctggcagcacttgcaaaagagcaaggaaagaacaatgtcgcttttctttgcttgttcatgttgggtcaagtagaagactgcctgcatctgttggtggaaaggtacattgtttactatttcttacatgtggaacatatattcccgcaactaattacgtctatgctgatattaatatggttacagtaatcgaatacctgaagccgctctgatggcgagatcgtaccttccaagcaaggtctccgaaatagtggcattgtggagaaacgatttgaccaaggttagtggtagacacatccgatgcaccttgtgattgaatttcaaaccttgcctgttgagatatccacaatttttcttcatcctctgtcaatctggatatagataagtccaaaggctgctgaatctctggctgatcccgaagagtatcccaatctctttgaggagtggcaagtcgccctgtcccttgaaaatagagctgcagagacgaggtatcttttcgtcgttgccgtcattagcttattcttaaaaacagtgcttatgaggaaacctttttaattgaattgtgggacttaagccatttagagtcatgtgtctgtattacatagcaaggtagccgtcatgtatttgcttataatttgaatttatacccgtataaacataagccgaatgtcgatttcattttttcaggatcctcataaacaaagtatttttgttgacttatcttgcaggggcgtccatcctcctgctggggattattgtagtcatgcagacagagatcatacaactttagtggatgcttttagaattatgcaaatagaggaagagggtcgacttgagcaaggggatgttctcgacgaggtatgcatgtttacattacatgcattgaagaggattgtcttttacccatgatatccaatccaatggtcttggccatggtggacaatggtaggatcattaattctactgtcgctgcttcatttgttgtgaacaggttggggaagagggggaagatggagaggaagaggaggaggaggatcgtcaggaagagagtagtgatgggagacagcagaatgtggaagaagaggctgttgtggtggacgctgactctacggatggtgctgtgctagttaatggtaacgagtctgaagaacagtggggtaagattagtgaaggaaccgcatcagccttatagcatttgtggttatcaattgattataagatgtcgctgcaccaaaatatccttttgccatctgcacatatatcataggatttgcgtttgcatctgtccatcaatgtttcctcatctgtctgcctcccatcttcgtcttactgatcatcttacttttgatgttgactgtcttttaaatagtgcttctctatgccattaacttttttatcaatccgtggactgattaaatatttgtttgttgtacagttctaacaccgccacaagagtagggttggtgaagagtgaagacatacacagatagatattttcttggctttgaaacttgatacattcagcagagaaatgaggcagcacagagagagattagtttccattgttaaaaaactgatctattgatagcttccgctttgtgcttttaatacagatacatattaaaaaaaaagggggttttgggactcttatgtagctttaacttatgagagatttcacctgtagaatatctgttttgaactgagatttcacccatataatatgttttgactttcgattcaataggttatgtagttgatatcttttttttttttgcaaaactcaatagcagtagcaaaaaacttaattggaaataatcaaagtgaagggataagttgggaaagagccagaggataacgcatggtgcattattattagtattgtggaggagacgcatctcgaaacatctctcaaagcaaacaaggacccaaaacaaagttccttgcattcttccactgtccgtaatcaccatcaccatatcattattcttctacccattttgtcttggaaatgattttaaattttcttgttgcttcttactgcaaactgtgtataggttcaactactccattgagttacacacttgcatgcacctatggaagttaattttccggttttgattgatattcaagttgttgaccaatggagttatatacccttgatttatatagaaaccacatgttttatttatattaacatggtcacttttgtcaggattaatagacaacaatagttgagagaaaaagtgataaggtagagctaatttgtattaaacttatcaattagtattgttggttaaaaaaaagttaataaagtagtcaagttggataattcccaaaaactgggaaaaaagaactcaagcgtcaaatgttgtaggtgcatcatcatcagtctacaagtagtaaaaaacccattcgatttgataagaagacccaacggaaagagtcttcccgtctacaaagtaaacccaatcaatcttaataatctttaagaggttttttcttattataattatctatctctctatctatctatctgcggatctctcatgaagaaacactgaggagattctctcgctctgatctcctggtatcgtcgtctctctccgtagagatatactagtttgtcccatatccgattgattgctctattcaatttattcctcttctaggttttcggtttggccctccgatttagagggattgatggcccctgatggcgttgaagactccgactatgagagtgatcccgacgagttgaaccgctccttggctacacggaggagagaagccagcgatgatgatgaggatgatgaagaagcggacgaccatgataagctgcgagcagcaatccagattcattccgatgaacacagtggtgttgttgttgtcgactctgatgataatgaaggattgcacatagaagatagttatggtgatgatgacgacgaagaggaagatggtgattatggacaagttgatgaccatgtcgaatacattgcggataataatgacaagacaattgtcgccggcaatgggaccgatgactctgccgccactgatcttgtggatggagaggaacaaaagaagaaggaaccttttgcagtgcctactgctggagctttctatatgcatgatgacagatttcaggaattggatgccgcctctaataggtaaactctttttgattctatgaggaggtagtgttttgtccaaactatgcaaatgtatctatctactattgaggtagagtacattgataggtgaaattagcaaacgactttccgtcattcaatctcatgatgtacttcagagttcagatagattggaacaactgctttggttttatgttttaactttgattgtgaatctttatgtatgaatctacccgagatgccatcacactgctatttttccatttaacattctgtttagttacatggtaatgccaaccgatataggttttcgttttttatttctgtaggcgaatgcgtggtggtaggaggctctggcaatccagagatgaaagaaagtggggacatgacaaattcgaggaaatgaatacacagaaacagcaatatgatgtacttttctctgatcatctctctttctctttctctccttttcataaatatatttgtattcatcgacttgtttcctcttgctgtgtttatacatttgccacctcttttttctttttccttttttttttccttttgaaagctgattaattaaacttgtgaacatagaggaggacttcgagaggccgaggcagaggtcgtggtcagggtaggggtcaggaccgtggacagtctcgggggaacaattctaaagaatttactggcaatggacaccaaaatcagtttccgaaggctgtcacgagagggaggggggccagaagatatgaggttgcattgagaaatgggaatcaagcaccttctgtgcaaaccaaacagtgagtccttaattttgtttcctctctagtcaacacatgaaggctctaggtctctaattgttgtgtctttttacggaatctttaggtcccaaaattcgtctgtggaagtgtcacacgttgatttagggcgtccaccaacagaaacagctaccttagagactgaagccatccaagccaaaaagaatgtatttgcttcaagtttaaattcagcttctcctccattttatccttcaagatccaacaataacttggcacaaaaggatgtacaagctggcatgggtaggctgcacattaatgaaaaccctaatccgactggaaagaagtttgggaatacaaaatccagctccttgtggggacgcactgctcagactacaagtcatggtagaggtgtacctcctcatgggcaagtgctttaccagcaatctcctaatcaaggtgacaaagtttcttcgccgatgcaaatccgtggaatgcctaaaggcactgaccagagctgtactcaacttcctggtcaggtttttaatcaacattcggctgttatcagtttgctgccttcttctcctccaaaaaccggatcatcagaaaatccgtatctttctggtgaaatagagtcagccgtagaaacaggtgctttggttgccaagggaaaagggtctctccaacctagtggaaggggatcttttatgtatggagggacacagtttatgggccctgccgggatggcagctggtcacggcaatccaaatttccctgcttttctacctggtaagttgttcttgaatgtcattgttcatcctacattgtaatggttgaaagacatctttcagaatcaatctatgcatgctagtgaaattgagagctattgatgctgagccgcttggcctggttgcccatgtctagggccgcttgagaacggcacctttttgtacaggtgctaatatgcacgcctgactagtttaaacttgtttgttttcattttcatgttcagttatgcaattcggtggtcagcatggtggggttccaacttttggaatggctcttccaggttatttccaaccagaacatggtaccggaaatcctgagatgacatggtatgcagttccacagctatgttttaaaagttatatatttggtgcattcttagttgacttgctgcatgcttttgtaatttgagaggatgtttaatcttgtaactagtcttttactagcccaaacagaacctgaattattgctttcactcgtctgctgtttgttttttgtttgatttccctatttctctatctatagtaggtccttattactgctattattttcttaaattattgacaggctgccaattttggctggccctggagcattagggggttcatattgtccaccttatactgtccttgatggttcttaccaagcagacaaaccagggttaccttcctctgccggatcgtccaggtttagaaataattttctcagtattgttaatcaacatgtcatttccatatgcatatgtgtagactctttgctttttaccttagaggaagagtagtatgggaatgcagctttaagcccttaactaagtaacgtatgtgagattttagatttgtggttcctcttattctagacccactgcaaaatgcttgttacctgttagatttacatttcttaagtgcttagattagtagtttctcgactatgtacacccagaaacatgtagttttcattaaacagactcactttcttggttgggcactcatgtaaccatgtcaatcatctctgattatgagcgtctagtaaagcatataatttgagctcaagtacccaattaccttatatttttgattttttgttgcagccaagagaacagttccaataatcctaatgatgaagagcccatggagagacctggtaagtaataactcttgccaattaaatggggttgttataatggattcagaagattttgttgtgttttggcgaataagaaatttgaatgattacatggagagactgattcgtatgggggtttattgatgtagaggttacgaacaatgggaattctcaacggtcaaatagcaacccaaacaagcagcctcgtaggtgagttttgaagcaatctagtttatttatcggtcagtgttagtgtgacgtgaaaccaccttgaaatcaaagtaccacaggagtagttggatacagatatttgtggaaatgaaatgttaatattggtccaggatgaaatgaaacactaacgagcacatgttgacgagggatgtgcagatactcggagatgagctttagcaagtgagtaaagaagagtggaaaggaagaaggtcatctaatttgactaagtggagtgaaaggaggagggtgagagagaagagctccttaggagcagcaggcccttggtgcttctccaactgctttatgaagccgtttgggctgctattattgttacctatttttattaggtacgcaatttctctcaagataccaattgaagagaggttttaaccacattataatttgaacttgtgtttgctgttttgttttcaggaggttgttgtgcaattgaaaagaatttttgttttgttttcgttgttatgagagcttgagcttgagccgtgggcgtccttcatctgtaatttattcttttgtccgtttgggttcaaattgatattttgtaatgttgatatgtgttattctgttttcgtttgtcaacttctttatcaaaagttgtgtgccctattcgtacgcctgcgaagtccccccaagaattgcccatgttgagttttgatggtagttagttgtctatgttttatattttacgcaaggggatagtggtggtgctcagtcaaatttacccgattcgtgagaaatgagtcattgaggaattgttaccatatatataaagacatgcctccgctctggttatttagttatgcgacaaaaacaaaacagaccgcatagaatagatgcaacaaaccaagtgtatagaaactttattccttggcgcagcaaaaaaaaaaaaagggatagagtctccgttgattcaggtagctcagcgtcctctgagatgaaacgattgttgttgtttgtttgttgattttagtttttagtttagtggaagatgatcggtaatagcgtctacatctcaccgtcaccgtcaccgtccgaccactctctctcgcccaaccctaatctctgcatctcggcggttggtttctactgtcttcctttctctctctctatttactacaaattttgatttcaatttgggtttccgatttcgatttcaattttgaatttgatggtcttcagatggaagagcagctggttgttgatgatgatgatgatgaccttgctcctcctccaatccctgatctcgatattgaccttgaagatgatgatgacgcctgttgtcacggcttgcttcatatcgcacctaatcacgaagaagaaactggatgcgacgaaaacgcttttgctaatgaaaagtgtttgatggctcctcctcctactcctggaatggagttcgagtcctacgatgatgcttacagtttctacaactcatacgcccgtgagctcggttttgctatccgcgtcaagtcctcctggactaagcgtaacagcaaggagaaacgtggtgctgtcttgtgttgcaactgccaaggtttcaagctgcttaaagatgctcactcccggagaaaggagacccgcaccggctgccaggccatgattcgccttcgactcatccactttgatcgatggaaagttgatcaagtcaaactcgaccacaaccactcctttgatcctcaacgtgcccacaattccaagtctcacaagaaatcctcctcctcagcttctcctgcaactaagacaaatcccgaaccacctccccatgtccaagtccggactatcaaattgtatcgaacccttgcccttgacacaccacccgctcttggaacttcactctctagcggggagaccagcgatctcagccttgatcacttccaatcttcaaggcgcttggagctcagagggggtttcagggccttgcaggatttcttcttccaaattcagctttccagccccaactttctttacctcatggaccttgccgacgacgggagtctcaggaatgtcttttggattgacgctcgagctagggctgcatactctcactttggcgacgttcttctgttcgacaccacttgtttatctaacgcatacgagcttccccttgtggcctttgttggaattaaccaccatggagatacaatcttgctcggctgtggtttgcttgctgatcagagctttgagacctatgtctggctcttcagagcgtggctaacctgcatgttaggccgtcccccacagatctttatcacggaacagtgcaaggcaatgcggaccgctgtctctgaagtttttccaagggctcatcatcgtcttagcttgacccacgtcctgcacaacatctgtcagagtgttgtccaactacaagattctgacttgttccctatggcacttaacagagtagtctacggttgtctcaaggtcgaagaatttgaaacagcttgggaagagatgatcattcgctttgggatgacaaataacgagaccatcagggacatgtttcaagatcgagaactctgggctccagtttacctcaaggatacatttttggccggggcgctgacttttccactgggaaatgtggcagccccgttcatcttcagtggctatgttcatgagaacacatccctgagagaattccttgaagggtacgaatcttttctggataaaaagtacacaagagaagccttgtgcgactcagagtccttaaagttgatccccaagctcaaaacaacgcacccctacgagtcccagatggcaaaggtcttcacaatggagatatttagaaggttccaagacgaggtctcagcaatgtcttcatgttttggagtaacgcaagtccactcaaacgggtcggcctcctcgtacgtagtgaaagagagggagggagacaaagtgagagactttgaggtcatctacgagacaagtgcagcagcacaagtacgttgcttctgtgtctgtgggggtttcagcttcaatgggtaccaatgcagacacgtgctcctcctactcagccacaacggcttgcaggaagtcccgcctcagtatatactgcaacggtggcggaaggacgtgaaacgtctctatgtggcggaatttgggtcaggtcgtgtggacataatgaatccggatcaatggtatgagcatttgcacagaagagcgatgcaggttgttgaacaagggatgagatcgaaagagcattgcagagctgcctgggaagcgtttagagagtgtgccaataaggtccaatttgtgacagagaagccttcatagatacttacttacactgtctttgtacgagagctgattagaatctgtaatcatattatacaggttctactaccagtaattaactaggatggattagagcaaatcttgtactgtagtagatcccagtgttgcaattgtggttattttacaggttcccgaaaatatgacattttcaaaatttcttgtacaaatgaaattattttggtcaactaggctttcttttacaattgggctttgtcgattaggtgggcctattattatatgaaactgggtttcctcttgtgtagcccagtgggcagtataaaaatcagcccaaaacataactgcgaaattcaaattcttacccactcgcacaattagcgcgtcgacgccaccctacaaaaaatggctgtttttggtaaaattaaaaaattgggcgcgtgagggagttttctgtgttgaggagaaaaccaacggtcgttgacattttaactaaatgtgtacgttttatttgtgattagtttgcccaaaaaaaaaaaggaacacgcaaaacacattcccatcagctcaaaaccaacaaaagagaaaaacttatgaatagagatattgagagacagagaaagtaaaataattttctacgatgccaaattgtaatatcaaatcataactgtatcaatcacaacatacataaccccaaagagagacatatggtaaaagaaacataagcaagcacaaggctaaaaatccagagagcctacagtgaccaaagcaaaatatggtttaaaaaaaaaaaatggtaaagctaaaactacatcaaaggacaaggaatgatattacaaggacacctcaagactccatcttcaggttgttttctgaggtggaattggaggagctgtgcttgaaccagtcctttgcgcagaagagagcttccaaggtcacatgtcgaagggagctcctgtaattatccatctttttcacctccgtgtcaaaaacagaatctggagagacagtgcaaaagggtacagacaaaacatcagctgccatcttggagagggttgggtatttggttcggttcaggctccaccagcctagaacctcaaaatcttgtgatcgcggtattagagattcctctaggtattggtcgagttccgatttcatctgttggtgactgcctacctccgagatgtaaagctcaaagtctgagaaaccatctccaatggtgatgaggggaaactcctgtgaagatgcttcaaggtggtggccttcctggagaaggacgtcaacgtggtgaccttcttgagagattgtaaatgtggcttcttcttgtggcattgcatgtgactgagaatcatgttgtgcttcttcttcatgtggcattgcatgtgattgaggatgttgctctgattgctgctcttcttgtacagattcaccttcacgagaatactcttgtgggttttggctgttttcgggaatttgctccactggccttgcctcctgtgccacttcctcaactggctgagtgtcctctagtatcccctctactgcatgtgtctcatgtcctgcttcctcaactagctgaacatcatcatggttttcctccaccagttgtgcctcctgagcaccttcctcaactggttgagtatcctccagcaattccccctccggctgtatctcatgtcctacttcctcaacagactgaatgtcatcatgcacctccagctcttgagcctcatgatccactccctcaactggttgagtgtcctcgagcatttcctctaccggctgtacgtcatgggttatatccttatcatccacttgctggttttccagcggtatttcctccactggccggctcacctgtgacgtttcttcctgcatcacttcttcaacaggttgagtgtcttcaacgatttcctccattggcagtgtctccggtacatttccttcccctgactggctctgaaggggtacgttctcagaaggctggctctcacatggaaattcctcaaccagctgggtctcatgggccatctcctcagctgactggttcgcatgtgtttcctccattgtctcatctgttagccggctctcctgggccgtagttggctctccattggattgcagattttcttctgtcagaagaggcttttgtgtcagcccatccattggtttgctctcttccaactgcccttccacaatattgttctcctgtgtcccagcatctcccaaatggccttcttgttctactccctgtgtggtattgcctcccaccgattctgtccccgtaggctgaccttctccagatagtccctccaaaggtttttcattcagtggatttccatcttcaggttgttcaaatatttgatcatgtgaaagcccatttgagttgtggtattcatgatggaagtgaacttgagacatatctgtttcagaaaagccatcgttcccatggactacataagcatccagcagggagtgactctgttcagcatagtcatggtacagctcatgtacagcatcatcaacactcctgatccatttatctgcatcttccccataagccttagagaaactaaactcaataagcttcattttgaagcgtggatccatcaccacagcaacagccataagcaggaaacattctctccagtactcgtcaaacttatctttcagtgtgtttgctaggttgcttacatcttgatcttcactcgtggctgagttgcctagatctagctgaagctttgtcatttcatggaacaaatcgtttgctgtcaatcgagttgagccagtcaaaacattggccgcgtcaaaaaggatcttcaaggacgagcaaaggatctcaatctttctccattcttcaggagatgttaatattttataatcaagatcgcagtttcccaaacaagagaagacctctttgtgttcacaggcagccaataacatgtcgtaactagtgtcccatttcgtttggttgtcaatgagaagatcttttgtcgaaggggtttgaagttgtttcttcagttcatcaaatctctcttggcaactatctttggttttcacatacttgacactatcacggactttttttatgggtgttttaaaatcctcagctccaagcagatcttgcgccatactgcttaggaggcgggcatagcaattacccaacaacaactgaccattcaatacattctggttcctggcagacaaacagcatctgaggttttcaatagaggttttgtttaccactgattgcccaacagtgatgctggaaagccttctctccagattccagtcggataaacaagctgcaataggctgattcaaagcaaaatctgagtcaggagaagggacgacagcaacatttagaagcctgtgagttagtttccaatccctatcaatgaagtgtcccgtcacaaacgcatacccaagtgattgattagatgtccagagatcaacggtaaggttaacccgcccaggaatgtcagtgatgaagtttgaaagtttgtgcttctcggacaagtacatattgacacaatcagcatgaatggtattgaagcttgccatagtgaactggggacaaagggcctgcacgaaaccagtaaatccagaatgctcaaccatgtgaaggggataatcatgcatgataatcatctttgccatctgattgtagcaacggtcttgatctagaggggtgtatgaagcagaagacctatggcgtttcttgggaggatcagtggtggtggtgggagtaacgatttgtgcgagggtgctgctgtcgtctcggttcatgggacaaatacccagttgaatgtgacgtttaagatggctagttcctgccaacttttggccattaatgtaggcgaaggatttgcggcagtggttgcagcaagctttggcagatccagggctaacagtttcaacagtgaagtggttccagacgtcagacttcttcctcctgcgcttggtgggtagggtgacaggttcaagggtatgggaggcatcgacatggacatgggattggtcatcgatctcaaaagagccattgttatcaatgagcatcaaggaattagtatccatatccttggctggaaagaaaagtcctggagaagcaaaatagaatcagatttcttctctatactttgctagaataccagcagaactggagagaaacaaaaattgaaacataacagaacaacaaacaaacaagtaaggccagtccaattcaacaaggagagaagatggtaaaacagaaactgatttagaagaaagaaaggtctgtctttagaagagagatctgtttaataccgtgaccgtaggagccaggaggagatagttgacgaattggagaagagaattcaggcgatctggaaaagcagagtaaaatcgagtaagaagagagagcgagatctaagatatgagatcttaacagagagaaaaagattaggactcacagattgtagcagcgggaatacgactgagggaagcgcgaatcgaggcgcaataacgaaacttttgaaaaaacaaaagaaagagagatgaaggagacgagacgaggttaatgggctttggggatgatgagctgattttgttcggctctgcttctttctttttgatcgaaagagattctcaatagagagagagagagagagagagagagaggctaaactcttctcttgcgtctgttttggaccttattattacggctagggttttgagctttttttcttttcggccttttctcttcacctttatatttatcatatataccatgtttggagggcaaaattggtattcactcacattccctcttctccaaagatctacttttattttttccttttcagtcgtacctgtctatctgtcacacaagattttaactttgcgttagtatgctttaccgaatatgtaaattatctatataaaattaagaaggaaatccaatgcaaaaacacacaaaaagggaaaaaagggaatgaaaattgttataaatggtacgggttggaaaaggcatgattgtactgcgtctgctagtgctggatcttcttaattgtctttctaaatcctatggctaaaaatgcagcagcactgtatatgaaaaaataactcgagaggcttcgtaatttctgataatcatatgtcataagtacacaaaaaaataagccttctcttggatacttttctttttttatcatccacgtaacatgttccatcaacacatgcaaccatttcctcaagacgactccatcaaacaccaatgaccaaccaaattaaatggagcggtttagtaagaaacccttcaattctctcacttctttttttaccaaaaccaactcgataaaccggttgtatctctctactactatttttagaactaggggcaggtagaggagaaccgccctcttctcacaatctgtgcatcaaattgaaactgaaagaaaccaaaaaaaaaaaatgtgttgtttttcgcaacagaccctcacattaacaaatgaaacaatgaacttttccacattggtaccatgaattctgcggataaaaagctttaatgcaagacctgttagttgaagatggatctctagaggttatctctcagccattttagagctccatttgcgacagacctacaaaaaataaagtagcacaactttgtttgagaatgaagacattatgtgcttctgatttaagaacacaacaagagctaaacaatccacttatatgacttcaaaggaatagaaatcaagggcacaatcttttttattaaattagtttaccctgcaaattctttgatgttattccacaagtagttttcttgctccggttcttcattttcctccttaacttcatctttcttgttttctgagccactgggtgcagtgctcagagctgaaaaaataaaggcaacatactcatgacggacttcatcaatgtatacgtgtatcaaatagtctcacatcgatgccgatgcacagaagatacaagaggttccattaatattggcatacaatcaaagagccctctttattagagatttgacaacttactactgggttgctgaggcttagcacgagttcgtgagcggttgctggacgtgtccttcagagatgcaagttcctccagcaactcccgttctccagcactgtccgtaggtccagaaaacgaattgaaagaaggtatcgacagactcacaaaattttgtttggattcgttaaataagccacaagacagttcaaacggtaataccttatttgatttggtacagaaactttgactgtaaacaagtggtcaccgcggatagacggtctattcagtttcggtactcctttctttgccaggactagcacatcaccaggttgtgtacctggaggtatctgcagttcagtgtctccttcaactgttttcacctacaacgatgttttagattaatcataagatgaatggtaaattgtgagactatcaacacgtaagtagagtgtactgcttatacatccaatacaaagaactaaatcaccttaacaacagcacccagtatagcatcaaggtaactgatcgaaagggtagataataggtttatgccatctctttcaattccccggacatcttcaacatcaagatatacatacaaatctcctggagggccactagtggaagcagaaagtcgattaccaaaaatcagaaccattaagatcatataacagaaggaatggttttctactggtaatttatcaatcggtaattttctcaacataccctctgggaccagaatcaccttctccggcgactctaaggatgctacctgcactaactcccgggggaattttgactttgatgcttttttttatacgcacacgcccttctccagaacatttccggcaattttcagaaatcacctcaccatctccaccacagtttggacatatagaaacctaacgagaccacacacataggaaatttataaggaggtagtgttaccagcaaaaacaaactttcacaaacaataaaaccacaaactggattcaaccaaattccgagcgaattctcacttatgcacttactactaaccacaaacagattagtttgagtaaactacacattgacatcaactctgatgctccaatcagatgccatttctgacatcgactcgaattaactgcaacagagataaagcagacagaacggaaagaaatcaactgcacggacctgtgaaaacatgccaaatggtgtttgctcagttctcataacttgaccccgcccaccacaagtggagcatattctcatcttggatcctgcttttgccccggtgccagcacaagcttcacatgtctccagatgcgtaagatcaaattctttctcagatccaaaaatagcctccgaaagttctaaggtgatgtcatacctaaaacgcaatagaaacaaaaatgcaaattaatcacttttggtttttctcaaagcttatgcagaacatgaagagcaaggaaaaactccaaaagaaaaagcaagcgagtggacatacagacacaaacctcctctgcttgctgattcaagcccatggtagtagaaaatttcaggacacatggtaagttaggagacactaacaatatttttaaggtaatgattgaatggtatcttatcagcaaacagtgaatgttgttatgctaccagagaatagagaggaaatcctttggcggtaagtcaataaatgctttgtttcctaatagaaactcaccgtaaatcttcacctttggtaaccctactgcggcgggttctcccaaaatcagcttggtccatcccgggaaatccacccatacttgcaccaaagaatgtctcgaaaaggtcaaagggatttgactggttggaaatgtaagaggaagtaaatgtcaaggacaactatcggacaagcacagtagctaatggccaatgcacacatcaaatcaggtttcaacatctaatgcatcagcaagagaagaaacgcacaaatagtgccctaagctagccagtcatgggtatgattaagcatagccagaaaaagatgaagtgttaccgtgtaaggaccagaagctcctcctactgtactcttgacaccggcttcaccatattgatcatataatgctctcttttgctcgtctgatagcacctgacaatgttgtagttcagtaaccataaggcaaaatagctgacaactcatgttataaaagcaaagccttgtaatcatgcaagctaacaagtaacaagaaaagaaaacccaaaaaaagtggtgataggacaggaaaagatgacatgaagagaatcgaactggggggaccttagcttttggtgcatacctcataggcagcactgatttccttgaatttttcagttgctccgggttccttgttcacatcgggatgatactagatataaaaagttgataatcagctgagatcatagctcaataagcttgaaataaagtagaaaactaaagcagagcttgatgttgagtagattaaagtaataaaaattcaaataatatcatgttcatgtggaaacaaacaattgattcgttgactcgtcctagtttgcacaacacaaccgtttacagacccagaattagagaaaatgctaacataatctccggatgcataattacttggatgatcaggttttcacattggcaatttcggcggccgtaagtaatgtcataagcgggagaaattcacaaagcagaaaaacgaattacaaagaaatagaaaggatgaggaggaggtggtaaacctgacgagcgagccgtcgataagcagctttaatctccttgttattggcagatttagagacaccgagagtggcgtagtagtctccggaagtagcaaatacgacgagggaacggccccgtcgatttcgataaggcgtagacgaagaagacgaagatgaaagcgacaagaagctcttgtgatacctgaaattggaaccgccgtcggaaaaggcagagaaattagaagagagggaacggggaccatcggcggcggcagcgaagcagagagaagaggggatgagggagggagaagcgagggcagccattagagacaaaatggaatcaaacgagcttctcaagctaccaagaggacgcggagaagcttggcaacgggcattgttgagagatgatgacgatgattccaaaagcgttttaggctaaagagagtgaaattcgggattttgtggtgcgaacctcgctcacgtggattttcttcctttctttcctttttatttttctcttccatcacttcttttgccgtaacccaaaagtctcgtttgcttatttcttacaggtaaaatcattcattcatatcatatactactaatggttgatccgattcgaattttcagaacaatgtcaaattatacagccctatgtaccaaaacacatccttgatttccaaaataaatgcgcctgagacaaacagcagcaaaccaaagaaatatataaaaaaaaaaggaaaggaaacagaatgtttgtttgtcctgactacacagtattacaatgcaaaagcacttttgttttgtagtttgatatcgctctctctctctctctccctctactttcgtttattgccttctcctcctctgcaagtgtccttgtcttcttggagagctttagaagacgtccggattgaatcttgctggcattgagttgccatgttccacttgctgcagctgcattctcaacgcgtaattgttcacctgcattttttctaccttttgtcattcactctttcttttatgaggcatcatcaaattctaacaacatctgtttttggttcaattttaaaacaaccaacaccagaccattcaaagcaatagcaagggatatgcagaagctctctatcgcctaaggcttacctccagatttctaagcttttcctgatactgaggaaccagttgcttcaaaagtcctagctgatggttcgcatcctccaatgccttctgccgctcatgctggatagcaacagcacgtttgaggactgtgttgtccttcaccaaggtctccacctgttgctgcactgccactttctcctgtaaaatcatatgagattgttattttgagacaagatatgccaaaaatactaagaagagattgttactaagaacaaaattactatgataactttatttcccccattgaaaaacaaaccctcttcagatatcatagttaatgcagaacaaatggacgatgattgtcctttcacagttgattcctcattgccattatacataattgtgtttagatccaacaaacttgtaatcagtgacgagcgtatgcacctacataagaagtaactaatggttcaacctatgtcctacagcaactgaaactgtcttccatgcccagagctcaaagaacaaatatgattatcactattcatggtctgatagccagtatgtatgcacaaggtgcatatgtaagggtatattttgaaagaaacacattaagaaagatgcaatgctttatttacctcttggaatttgtttccagcttcttcacgagcacgtgcacttaacatcttctctaaggcctcaaggactcttgctgcacgtacttttgcatcatctgtaccagacgattgtaacacttccctgactaacaattcaacccagtcatcaccactggtcggggggtttccaccacaaacggcatcagtttcctgagtagcagcacctcctgcggccaattcttcagctttcttctcctcagaagatgcgaaagagtataagctcttcatagcagcattaaaatcacttccattatcttctagtgccttgacgagaacctgagaaagacttgcaaatctagttaaaccctagatactgtacaaaatttacttacaaccaatcgcataaagaacctgtgcaaccgagacgtgaattttcgatgctcaatttacaggcggtgaagaagaagaagaagagagatatcggagacagatgcgtaatttgaggtcaacaaatgcctagtcagtgagatttctagtacaagatgcgaacaaggtaaagctagatctgtgtggattgaatagaaggaagacctaccgtgagttcaatatgaggaaacgcagagtgaagctgatcgagcgatgaggaaggaggagaggaccagattggagaattggaaggcgaaaaacatcggaacctcttagaagagggcggagaagaattatcgtcgaagtaagatctcttggttccgcaatatacggcagacatggccctggccgtgaaaaccaaaacaagaattgacagctgattcgatccaaacgcgataaattagggtttagggagaaggagaagaagaagaagatgactcttgaagaaagaatctccgacgatcgagagagattgaggaaggagcgtcgtaagagaggtttcgtatctaagaaaatctaatcgggttttaggttttcgattgggtttccttttctttatcttaaaggccaggccaggagaccttattttaccctttttatatacagatctttaagcggcaggggctttctcgtacttttgttaatcacatgggcgcgttgcgttgcgcgtgaaactccctgccaacgtttttttcttttttcaaatattttgtttatctgataattccttttttgcccccttagtaaagttatctaacaaacaatatgatgtatattatttataaattctgccatgtaaatcactagaaaatcgacttgaattcattcatctgaagaacagtggtgcataatactgcataccttcgtattccgaatttcatagtaactagcatgaatcattccacatggagccaatagaaaacaaacaaatccttagttacaaaatcgattaaaccgattacattatttgtcataatcgttgaatagaaaaggcttttataaggttaattcatcaaactggtttggttccaccagaacgtacaaaggctttcccttcagcttacactgcccctacatatcgtagacaatgagttattttattatcttcaaatgtatgggcctatagcgcccattaaagcccaaaatattattgacgcgaatttaaaagaccttcaacttatgcaaacgaacaaagtaggtcatatagtaccttaaacttaggcaaaccaacaacgcatgcacactctacaacttcggccccggcacgctctaaagtgcatagaagagactcacttttagttcaataattatactcagatataatatacaacttcttaagcgtaaatatataaatcatcttgtttagcatgtagcattcattttctagctaatgaaagtagaaagatattatttacccaagaggttaatggaagcagagagtgtcccaccagtggcaactaaatcgtcgatgatgagagctcgttcctccgatttgacggcttctacactcatctctagacaatctcttccatactcaagttcgtactcttcgcttatcactctcccttttttaacatcacaatcaatagtatccttcaataacactttttctattccatcaaaatgtacgtttttgtctgagaagtgatatgtatgtatattactaatcgtaccgggtagttttcccggtttgcgtagtggaacgaacttggcacctatggctaacgcgatgggaggtccaaatatgaatcctctcgcctctactcctgcatacatcaatctatgtttttagtatttcttagacatttctaattatgttccaaaaaggttcactaaaagacaaaagaaaaaacaagagacagactaacgacaataataaagagtaaagggataagtaactagtcaccaaccacactagacaaactagtatgtgagtgtaaaatcattaatccataaaagttgtctatttgtttattcaatcttttcatattggctgatataattacgcttcggattctatatgtcgtatattataaatttaataatctatatgtgcgttgccttccaagctgaatgcttctcttaaggatatcgtaaattaatcaagaataaataaagaaatgtgttgcctttcaagctaaatcaataattagccggttttgttcgtgtgtgtcgtatttggcaaagactaattaaatagcgacttaaactataaaagaaggcatctaataatcatgagaaagtttaaagaaaggaaagtgaaaggaaccggcgacgagagagatgttcatgtgcttgtaacgatcaacgaagatgtcgacgacatgtttaaaggcaactggatccagcaacaacgttgttatgtcctgaaacatgatccctgcaacacaaacacactctaagcttagttagtttgtaagctaaaagaaaaactaaaggcaaagaagagaaaaatggaccagtcttggggaagtgaggaatgacacgaatggcgtcggagatggcctttaatctcgggtctccctgcaacccattctccacggcaaacatctctcactcactcgtgcttgtgcttacgtttgtcttggtgtttgtcgaagaagaagagagaatggggtttgctgtatttatgatagcatttatattgataattcttcctttctatctctatctctcatttatttccttcaccccactcatcgtacgtctccatccgaatttgttatttttaatatatcttttaaaaattgaaatatataaagaataatcaaattaaagctcacttgtaacgaccacttcatagtggttggatagatttactatgtaaattgagaaccaaagttcaaatatcttagattctatccaataatggttgactatatatagatttcatgttaatatgattaattttgtgggttctagtcttctagatcaaggcttttgtgtgatggatttttaccaaaaatcataaatgtgttgtggtattgatctaacgaaatcgatattctgtgccagcacagcatgcacgcatacttgtaaaaatatacagcgaatctttctttaccagaaaatcaacaaatctttctggaagatatgaaattgtaaactcgagcatttatagtaatagtggttatgacccatttatctctgtctttccataaacaaatcaatttccaaagaaagttgtaatgttaaaaggggagaaaacgttgattcaatggtaaaaccggtaaagaaggtaaaagaggagcaaggagggtccagatgtgagtgagagtagggagatagataaaataaaaacgtacgagtgcctatttcgactgttgaagcgcacgcctgctcttcttcttcttctttttgtttgattttcaaatcatttcattactttactatattttgtgccccacctatgttattatgtatgccgttttttcaatcacaagtagagatttggttggctttagatttcgtctagatatatggtttaacattttaagctccgcactactactactactagtactacttcttcttaccatataatttgagataagtgattacatcaccagttccattatacgttgtaaaacagagaagaaaagcaaagtggagacgtattagaaagctttcattttgaagcatcacagaaatacaagaaataaatcttataaacaaaagaagcctataattggattcaaagatatatagctgaaaacagatgaagaggcaaaatcaaaatcaatcagatgagactattatccttttctgtccactagtcggatctgaaccaacttatgcttttcatgatttcatctacatacacactatgactctagatcattagacacgtcactccttatatttcacaataaaacgacaacaacactcaaactcgattattgtagtggtctttcaaatccaacttcaaaacagaaaagaacacaacgaatacattcgtaagcggccgagttgcacctatctatatccttagatgttaggatttttttactgaaatatctaattggtcagtttatttcaagatttctaaacggtaagtaaagaaaaggaaaaatggttgaaagaagagatgatgaagtttgaaaacgaaacacaaggaatgcgtacctcacaaatatctttcgtgcagttaatttcaaaagagacagagaaggacaccaaatcttaggaggacaatcactacccaagatctcctctgcctctctttcatttacttccaataatttttttttttttaaagacataaaaaggattgaaagagagggacttgaccatgtgactctgtgctctcctctaacagtaacatcaactctaatcaaaatgccaatcaaagatcccacttatttgcgttttttactgttggcagatagtgtaagtcactgtatccactatcctctcaccttttggtgttacaacttgtaacttacaagtccagtgcatgcaggacaatgagactatcacacatccaatattagattagacccacatgctgagatccatcagtcataccaatttttttagaaagtagaatcctgacctgtaacaacctcagtggctgtgccttggggattactttactttattgagtggtatactcttcgtggatcacagaatgcagaatagacgagaatgaaagtcttcaagcctggctatagattgacactcactgtctacttctgcacttgcttccaccgtttctgcattttttcactttaccagccaagaaagcaaatacaaaagaacaaaaaaacaaaaaaacaaaaagtttattatgaagacaagaacaaaacccttacactcgtccaagaactaatccgatcattaagagccaaaattcgattgtttatctaaagacaaatctctcagagcggattcttcactttctcaagatgtacaaggaaacaatattctcaagctcaaaacaacctgagaaagtggtgaccagcttacatctaacattaattcaatgagatcctggttcattggtgaaacaaacttgaaactactaggaaggtttcaatcgaatgaaaacattaaattagatgtgaaccatatggcaccctatgaatccagattgtcaacaagttaactttatacacacagacaaatatgacaacgatagacagtttttactttttaataaaacagaggcaagaagatgagcatatgctagtggtggggcgtgtcattcttagattctcgggtggaacataggtttgaccagcaaaatggtgaggccaattattgggctcagtaggttggtatgggtttaaccattttcagcctatataaggtttaccttgccatattacttcaaaattattcaaaatcaacacaaatactcaatccattcttgttttatcacaaatcagatgatcttactactgtgttctaggctgaatttatgcgaataaaaatgtaccttccttcagctttcacaatgcatgaagatagatatgaaatttgtaaaactatggatcttttgatacaatcctggacaacaaattcataaaccaataatcattggaagagattaaaaaggggacataggaagaggttgtgacttacggatttacatcttgggtctgccaccgaaatgcttcaaagaaaatctggagggaccactgcgacactcgggtccttttctggaaactccccaacgtccagcatatggcaaccatcctttaattaagttaactagtctggattctgctgccggtaactcgtcttgtgctcctggataacacttctcagctacatcatccacaccgttctggttttggttttgtatttggatttcgttgacaatggatgacacatccaacctaccatacaaggattctttagcagagcattgaaatgcagagacgatataggaagattgttacaaagtacttactcgaggtaccgcttgcaactcgggctcttggatcttttgttcataggagagtggtctatcgacaaatgccttacgaaatgtaactgaaatagagtgaaagggatgttaagactttcaaaggaatgagattgcgtgcatacgattcttatatagaagtgagaaggagtttaacgaacttggtctccatcattgagaccgagataacggatgctagtcttgtcattgactaatctctggtctcgataacacaagcaaaaatgaccccagacgtgagacctgtaggcaaagatcaaagtgaacgactgtaccagaaagcttaagctgtgagaattttcatatgaaatgatgatataccatgaaatcatgccgtgaccttccagaggagaaatggtgaatacttgttccacagctcttttgagctctgccactgagcaatcctttgcaacttccacatctattgattcgttggaaaccatttaacttcttgagaggccaaatcagaaacagtaaccaaaaaactagttgatacttcatccaaaattatgtctattaaggctcttaaacaatgatttctaacagcaacaaaaaattccggattagagatcgattagggtatcaccaactgagggaaccgttgagcttgattgtaaactaaactcttaaaattgctatttcggaaactggataagcaaaatcgtaccgaaaagggagccgttgagcttaacgacggaaagcttgatacgaccctgaggaggaagtttcaggtaggaagatctccgtccagaaatcgaaccaccgtcgtttaaagcaaacgatgacaagaagcgtggatctatcaacgacctcagtcctccacttcgacgaccgtccctaaccggactatgctcttctcgcattgccgattctcccggattttcaccgacaagattctgctctctttgctcttcttcttcagccttcaggtgactgttgaggagctgagcgagcgagcgagagaatcgggagagtttgttttccggggaaaaaccgcaattactgctatatagctccccaataaatgccaaaacaaaaaatcaaattaaagtttgtcaatgggcatcacggcccaaatctaataatcaaaggcccaataacttgattcgacaatacttagcgggtttggataaccgcctaagcatctgttcgacaccgcctattttttttttttacttactcctcctgatctgctgatataaggccgaacgggaataaaaaaaaaaaaaaaggaagaagcgactcacccgaaaatgttttagggtttttctttactcgattaagctcactagttcttcgcaacgtagttagagatcgacactggcgcggtggatttagggtttttttcctccgcgactacgctcggcgtttcgatttggaaccctaagctatgtggaacaacaacgatggtatgcccttagctcctcctggtactggcgggtccatgatgccgccacctcccgctgctcatccttcttacacggcgcttccgccgccttctaatccgactcctccggtcgagcctactcctgaggaagcggaggctaagcttgaggagaaggcccgaaaatggatgcagctaaattccaaacggtacggcgacaagaggaagtttggattcgttgaaactcagaaggaggacatgccacctgagcacgtcaggaagatcatcaggctagttttcttctcttctttctctaccatttcgaaatacagtttacttgataattattttctggctaggtttctaagatttggttaggatttacttattttgagactgaagctgcgatttctttcttacttcagagatcatggtgatatgtcatccaagaaattccgtcacgacaaacgtgtataccttggagcccttaaattcgtccctcacgcagttttcaagctcttggagaacatgcctatgccctgggagcaggtacattttttttcctttagcttcagctgttttcatcgtctgttcatttatctaaatcctcattttctttcaggtccgagatgtaaaagttttgtaccacatcaccggagctattacatttgtgaacgagataccatgggttgtggaacctatttacatggctcaggttggtgattagtcttatctcttatttactgtctctgtgcgctgatggattttcaatagcttttgatggttattccattcttgttttgcagtggggtactatgtggattatgatgcgaagggagaagagggatcgtcgtcatttcaagagaatgcggttcccaccttttgatgatgaggagcctccactagactatgcagacaacttgctggacgtggatcctctggagccaattcaattggagctagatgaggaagaagattctgctgtccacacttggttttacgaccacaagccactcgttaaaacaaaactgattaatggtcccagttaccggaggtggaacctctcacttccaatcatggcaacccttcacaggcttgcaggccagttgctgtctgatttgattgatcgcaactacttctacttatttgacatgccatctttcttcacagcaaaagctctgaacatgtgcatacctggtacgccattttccttctatgctccagtttttatatttttgctgcgggtccattgcttttaatgcattctcctactcttttccaggtggacccaagtttgaacctttgtaccgtgatatggagaaaggggatgaggactggaatgagtttaatgacatcaacaagctcattattcgttcccctctgcgtactgagtacagaatagcttttccccatctctacaataatcggcccaggaaagtaaaactctgtgtgtatcacagtcctatgatcatgtatataaagaccgaggatcccgatcttcctgcattttattatgatccgttgattcacccaataagcaacaccaacaaggaaaaacgtgaaaggaaggtttatgatgatgaggatgacttcgccttaccagaaggtgtggaacctttgctaagagatacccaactctacactgacactacagctgctggcatatcattgttgtttgccccacgacctttcaatatgaggtctgggaggacgcgccgcgcagaagatattcccttggtgtcagagtggttcaaagagcactggtaagctatttgtttttattctactttggtcctctttaccgttttgaaatttactggtgaccgtcctaatacatattgtgaactcattaactgcagtcctccagcctatccggttaaagttcgggttagttaccaaaagctattgaagtgctatgtgctgaatgagttgcaccatagaccgcctaaagctcagaagaagaagcacttgtttcgatctcttgcagctacaaagtttttccaaagtaccgaactggattgggttgaagtgggtctgcaagtctgtcggcagggatataatatgctgaatctgctgattcataggaagaatttaaactacctgcatcttgactacaacttcaacctcaagcctgtgaaaactttgaccaccaaagagcgaaagaagtcacgttttgggaacgctttccatctgtgccgtgagatcctccgcctgacaaaacttgtagttgatgcaaatgtccaattccgacttggtaatgtcgatgccttccaattggctgatggtctgcagtatattttctctcatgttggccagttgacgggtatgtatcgttataaatacagactgatgaggcagattcggatgtgcaaggatttaaagcacttgatatattaccgtttcaatactggtccggtgggtaagggtccagggtgtggattttgggctccaatgtggagggtatggttgtttttccttcggggtatagttcctcttcttgaaagatggttagggaatcttcttgctcgtcaatttgaggggcgtcattcaaaaggagtggccaaaacagtcacaaagcagagagttgaaagccattttgatctggagcttcgggctgctgtcatgcatgacgtccttgatgctatgccaggtttccatttttacaaacttgtttatcaacgatgaaattgctttgctttattctttggttaacattttctgataatgtgcagagggtatcaagcaaaataaagcgcggactatattgcagcaccttagtgaggcatggcggtgctggaaagctaatatcccatggaaggtccctgggttacctgtgccgattgaaaatatgatcctgcgttatgtcaagtctaaggctgattggtggacgaatgttgctcactacaatcgtgagcgtatccgaagaggggctactgttgataagacagtttgtagaaagaatctcggaaggttgactcgtctttggctaaaggcagaacaggtctgttcattgtcttaatgactttgtcatttttgtttgaacattttatgaaactgcgttatatattgatgcgttatccttgtaaaactgttacaggaacgacagcacaattacctgaaagatggtccgtatgtcactccagaagaagcacttgcaatttatacaactactgttcattggctggaatcaaggaagttctcaccaattccattccctccattgtcatacaaacatgacacaaagttgctcatccttgcccttgagagactgaaggaatcatatagtgtagctgtgaggttgaaccagcagcagcgagaagagcttggtttgattgaacaagcttatgacaatcctcatgaagctctatcacgaataaaacgtcatcttctcacccaacgaggctttaaagaggtaactttatatttcactctatattggagcattggattgacataggtcttcaaggttactgttgtaaaatgatggtgaatatgtttttcttgcaggttggcatagaatttatggatctttatagctacttgattccagtttatgaaatagagcctctagagaaaattaccgatgcatatcttgatcaatacttgtggtacgaaggtgacaagcgtcacttgtttccaaactggattaagccagcagactcagagccgcccccacttctggtttataaatggtgtcaaggtatcaacaatttgcaaggcatatgggacacaggtgatgggcagtgtgtggtgatgctccaaactaagttcgaaaagttctttgagaaaatcgatttgacaatgttgaacaggtacatatctattcatactttattaattatagacattgagccacgactttctggagtaataaatattttgtgttgtttctttcaggcttcttcgtttggttcttgaccacaatattgcagactatgtgtccgccaagaataatgtggtcctgtcttacaaggatatgagtcatactaactcgtatggtctcattaggggacttcagtttgcatcgtttgttgttcagttttatggactattgcttgatcttttgcttcttggtttgactcgagcgagtgaaattgctgggccacctcagatgcctaatgagtttatgacgttttgggatacaaaagtggagacacgccatcccataagactctattctcggtatatagacaaagttcatataatgtttaaatttacccatgaagaagctcgggatcttattcagcgatatcttacggagcatcccgatcccaacaatgaaaacatggtgggatacaacaataagaagtgctggccaagagatgcaaggatgagactgatgaaacatgatggtatgttcttccctttttgttttatataatccggttgactatcatttatacattagatgttcatgttgtgtctcattgattattcttctttcagtcaatcttggtagaagtgtcttctgggacatgaagaaccgtcttcctcggagcatcactactttggagtgggagaatggctttgtctctgtctatagcaaggataatcctaacctgctctttagcatgtaagtcttttattcgagcattctagtccatctgatattagtgctagggcttcgtttagaccgtaatttggtactgctatcgacattagtgactcttttgcatcttgcttgcaggtgtggatttgaagtccggatactccctaaaatcaggatgacccaagaagctttcagcaacacaaaagatggtgtctggaatctgcaaaatgaacagacgaaggagaggactgcagtagcttttctgcgggttgacgatgaacacatgaaggtatttgagaatcgtgtgaggcagatcctcatgtcatcaggatcaaccacctttaccaagatcgtcaacaaatggaatacagctctaattggtacaatcctatgagccttggtttgcatcattgttagttttttatgatgtgttgtttagcatgaaactgatcacatactcttttataaacaggtctcatgacttacttccgggaagccactgtacacacgcaagagctcttggatctactggtcaagtgtgagaataaaatccaaaccaggattaagattgggctgaactcaaagatgcctagtcggtaagcaaacgctatcttactgaatttatggtcgacatagtagagctgtgtgtttatgtttctgtaacctgattgttctacttctctttggcagatttcctcctgttatcttctacactccaaaggaaattggtgggctgggaatgttgtcaatgggacatattttgatcccacaaagtgaccttcggtacagcaagcaaacagatgttggtgtaacccactttaggagtggaatgagccacgaggaagatcagcttataccaaatctttaccgttacatacagccgtgggaaagtgaatttattgattcacagcgggtgtgggcagaatatgctttgaagaggcaggaagcccaagcccaaaataggcgtcttacactggaagatctggaagtaagtatcatacttgtgtatttgttacctctttacttaaatgtcgaattttgagagagatatcagcgtgctagcttgctttcttttggtaatcttggaagtagtcttttctctttgcttgacagagggttttgggaggatatcattttgttgtgttgtcctctttttgtgaattttatttgcttctagaaatatctgatcattgaggtagaataataactcgtgtataaaaatatgacaggattcttgggataggggaattcctcgtataaatacactgtttcagaaggataggcacactttggcatatgataaaggttggagggttcggaccgacttcaagcagtaccaagtccttaaacaaaatccattctggtggacacaccagagacatgatgggaagttgtggaacttgaacaattaccgcactgatgtcatccaagctcttggaggtgttgagggtattcttgagcacacattattcaaggggacatagtaagtctgcttttcatttctcctctactaattatgatatttgtttcctaatagcataggacgttcagttgcgcacagcttttgttctcagcctatcacatcatatatgctaattttttcgtgctttacatgaactcagtttcccgacatgggagggacttttctgggagaaggcgtctggttttgaggagtcgatgaaatataagaagttgactaatgctcagaggtctggtctgaaccagattccaaatagaagattcacgctttggtggtcgccaacaattaatcgagcgaatgtctatgtgggtttccaagtgcagttggatctgacaggaatatttatgcatggaaagattcctacacttaagatatctttgattcagattttccgtgcccatttgtggcagaagatccatgagagtgttgttatggatctctgccaagtattggaccaagagttggacgctttggagatagaaactgtacagaaggagacaattcatccaaggaagagttataaaatgaacagctcttgtgctgatgttcttctatttgctgctcataaatggccaatgtctaagcctagcctggttgcagagtcgaaggatatgttcgaccagaaagcgagtaacaagtattggatagatgtgcaacttcgatggggagattatgactctcatgatattgagcgttatactagggccaaattcatggactatacaactgacaacatgtctatctatccatctccaacaggtatttattactttttccattttactttgttttgttagtctttacttttctgcagtatgtatcaaattttcttactaaatctgtgcaggtgtaatgattgggcttgatctggcatacaacctgcattctgcctttggtaattggttccctggatcaaagcctcttcttgctcaagcgatgaacaagatcatgaaggtaatcaattttcttcttgggtgtcttttgcagtactcgttttgtttagatctatgacttaccgtttaaaatttacatattgcagtccaatccggctctatatgtgttgagagagaggataaggaaaggtttgcagctatactcgtctgagcctacagagccatatttgtcatctcaaaactatggtgaaatattcagcaatcagattatatggtttgttgatgataccaatgtttatcgtgtcacgattcacaagacatttgaaggaaatttaacgacaaagccaatcaatggtgcgattttcattttcaatccaagaactgggcagttgttcctgaaggtatttcttcctctcccgcacttcactttaagaacaggcatatatgcattgttctacaaaactactacttctgtttctctagtaacaggctacagaatcttaagtaactgttttttcttgtcctttaggttatccatacaagtgtttgggctggtcagaagcgtcttggccagctagcgaaatggaaaactgcagaagaggttgctgcacttgtgcgatctctccctgttgaagaacagccaaagcagattattgtcacacggaaaggaatgttggatccccttgaggttcacttgcttgatttccccaacattgttattaagggaagcgagctgcagcttccgttccaggcttgcctaaagatagagaaatttggtgacctgattttgaaggctacagaaccgcagatggtcttgtttaatatatatgatgattggttgaagagtatttcttcttatactgccttttcaagacttattttgatccttcgtgcgcttcacgtgaataatgagaaggctaagatgttgttgaagcctgacaagtccgttgtcactgagccacatcacatctggccctctctcactgatgatcaatggatgaaggtaactcttctgccactttccaagtacttcttcttgctatattcttttatttgataggatccctctttacattctatatctgctgtttttatttactagtgagttatgtgatatatagcttttactttcttctctttttttgaaatagtccttccttactcacgatcatgttaaattcaggtggaggtagcacttagagatcttattctttctgactacgcaaagaaaaacaatgtgaatacctcagctctgacacaatcagagatccgagatattattcttggagctgagattactccaccctctcaacagaggcaacagatagctgagattgagaaacaggtactcgtaactgttacttctatgttctatcaggttttctaacaaacacaaacattgtgagagtggactgtgactattattctttgttcactgtaaatctatatcctatttgcaggcaaaggaagccagccagcttactgcagtcacaacaagaactacaaatgttcatggtgatgagctcattgtcaccaccacaagcccttacgagcaatctgcattcggttccaagacagattggcgtgtacgtgcaatatcagccactaatctttaccttagagtcaatcacatatatgtgaactcagatgacataaaggttagaatccaattcactttgtcaattaagtaaaagcctttcaggtgtcgaccttaaacactgtctgttgttgtcacaggaaaccggatacacctacatcatgccaaagaacattttgaagaagttcatatgcgttgcggatcttcgtactcaaattgctgggtatttatatggtattagtcccccggataatccccaggtgaaggagatccgttgtgttgtgatggtgccacagtggggaaatcatcagctagttcacctgccgtcatctcttcctgagcatgatttcctaaatgatcttgagcccttgggatggttgcacacacagcctaacgagctgcctcagctatcaccacaggtatatatatatatatatttatctttaccttctgttaacctcattgctaactgatcttttctttgataggatgtaacctctcattcccgtattctggagaacaacaagcaatgggatggagaaaaatgcatcatcctgacctgcagtttcactccgggctcctgctctttgacgtcatataagttgacccaaaccggatatgaatgggggcggcttaacaaggacaatggcagcaatcctcacggttaccttcccacccattatgaaaaggttcagatgctgctgagtgaccggttcctcgggttttacatggtaagacaacagagtttgcaattgtgcttttgtccttggatgatataaaccattgaaatctgatttttgtaactgatgttatgataggttcctgagagtggaccgtggaactatagcttcactggagtgaagcacacgttgagcatgaaatacagtgtcaaactcggatccccaaaggagttctatcacgaggagcatcgacccactcatttcctggagttcagcaacatggaggaggctgacattacagagggagatcgcgaggacacatttacttgagatatactcaattttcttaccgtgtgtgtgatttagctttattttgcagtatagacttgtaagatgttgtactgtcttgtgctttactgagatagatagtaaggtccctaaatcttaaaaagatggtttgccactataatcaaaatcttgaatgtgatgtaatcatacgtacgtgtataacggaattttggtaactaacgtcttcgatgagagaaaataaaacgacaaatttaaactattttaagaggtttttcccatttcgaataaacgccaaatgtacaaaacatggaagaacaagcaatacaagtctcttatctccggaaagataaaacagagatcaaagaacagagtatatagacagaaggaacacgttcgagcttacaagttttttttgtagccataaatggtggcgatattcaatccaactaatgcagaaaaggcatctaactaacattattaaactcgggaagtatttacagcagttttatcatccctcctctaactagatattagcataaaaatgaaattagggaatacaagaaagaatgcagaaagataggagaaccccaaagacttggaagtgcttgacacgtccgtagctccgtccggcaaagcaccgtcttcttctctagataggtgctggaccgtaccggaaggagctggtctcgacgtttctgcatcacacaatcttacagttgaaccagattttgaaccgaatgcatcatccaagtcactgtcccggttaacacacaaaccagcattgttatacagcctcagctttctcctcatcctccacactgtgtctctctcgaacggtactggtcctgtcagactgttatcgttgagcctcagctcgcttagatgcttcacgtcccggaactccaaaggaatctctccggtcagattattgccctctaggtgaaggacccgaagactgtttaaccgagtcaatgatttcggtatcgagccctggatgttcgtattcgagagaacaagaatcatcaagttcttgagccctttgaacgcgttttcaggaatcgttgttgagaattttgtgttgcctttgagcattaaagcttgaagagagtttaggccttggagagaagacgggaatggacctgataaccggttatagctcaaatccaaaagcactaattggttgagccggttaatcgattctgggataggaccagtgactctgtttcggctaagatcgattttgatcaacgatccacagcttgtgagtgtgggtggaaccggtccggttaaaagattctggttcaaatccagaacgctcagcgccggaagaacaaaaccgggaatggaaccagtcaaccggttaccactcaaatcaagcgatcttaaaccggagaaccggttgaacgacaagggaatggagccgttgaggtgatttttatgcaaatcaagaactttcaaattggtgagattgcccaattcgtcagggataggtcccaaaaaaccattctccctcagaaccagcgtttgcagactcgagccgaggcgtcccagaaacgccggtatgcgctgtggggcgcggcctaaacatcggtagaagaacaaggctttgaggtgtttgagcctcgtgagggactcagagacgtaagagcgttgtggatcacaagtcggaaacgccgtgtcgtctgagagcgctccgaacgacagagagaccacgtggtagacgttatcctggtccggcatacactcgatcccgtgccatctccctcggcaaacgtctggaatcgcggcagcccagtcgttgccggtcgcacgcataatgtcgtagacggcgtcttgctcgtcaggctccgtgcgagcgccgtcattggtcatcgtgaatccagtttgtgggccgtcgatcagagcagatggggccgtcgagtcggaggtgatcacagtgaaagatctgaccaacggagaaactatagacaagacaatgaatatttggcggaagaattcatatcgtgccatttcttagttgttgttgttgtgtgaatgcggtttaggttcgaaattgtcagtgtgtatatgtataattctgaagaaacaattggtgggtccataaaaacgttcgcaatgtctttatgactttcacgggataactcgaggagcgaaataaataaaattcatgattctcgatttctgcatttattgctttcacgagatattcccttcattcgtcttgtgttgggccctagatccgaccgcttcgtgaacgggacccgacgtctccttatcgtttactttttttttatttgggctgagcccattttcccatttacgatatgttgggctattattcaatttgtattttgaactgggcactgtatttgtttttgtaacaaaccgtagatagcaattgataaaaagtttcatatgtttgattctgaaccttaaaatcattattttgttgtaacacgagaatctgaataaacggacgcgtggtctgtgcatacgaaaagcacatgcccatggagcaacacatgtaatacgtgtcatcttactagtaacatgacatatatgaataatgaagtaactacgaaagcatcaaaacaaagattagaagttcataagcctcgtcccattttctttgagactttgactatcacccaaatacaaatcttcatgcagtcgtacagccgtctgatgcagttcaaggtcaaagatctgatgatcgacaagcggcggctggtcgaagttcctgataatgccactctaggggacgccttgaacactatggtaaaccacggctaaataattgttatttttttggttggagtcaaccgttttaagtatcaagaattactaacaagactattcttggtatcaaaccggtggcaaaccgagttagagctgtaccggtggctgccaaaccaggccaatggctgggagccgggggatcaatgatagtagagttggacaaacagagcggaagtgcaagaaaacagtacataggaatggtgaccatgctcgacgttgtggctcacatcgccggcgatgacggcgagagtgggcttgataagaaaatggctgcccctgtctcttctatcattggtcattgccctgagggtcttagcctctggtctctcaatcctaataccaggttaatagtatagaagatttgtaaaattaaattgctttcagtataattaatccttcccttttataatgttagatgttgtacacttttctcacatagtaagaattcttttgcaacacctaatatatatacccatatttcagtcattaattgtttatagtttcatattttttataattcaaactaaatgataaattagaaattataatgcaaatttttcatagaaaaatgcaaaacatttttctcttgtcaaaaatcttaacattatatatgaacggatagagtactaatcaaagatggtcattgatgaaagcagcatcatggattgtatggagatgttgagtaaaggaatccacagggtattggttccattggacagtaatacagaaaatataacaggacctgagttggtagagtcagcttctgcttacgcaatgctgagtcagatggatctcatctctttcttcttcgaccaatcctctcaattgcatggtatcctctcccacaccgtcactgatctctccgctattcacaacactgttttagccctcactagccaggtaaatttcacaagtcaagaattttcatctttattcattaaatcctaagttaaacgcttgtaatgtttaataccaggctagagtgaaagatgcaatacaatgcatgagtatagcaatgctcaatgcggttcctatcgtcgaagcctctggtgagggagaggatcataaacagctcgtcgacgtaggtgtctttacttatacatgtatctatcagtatctattaagatcaaatgttgattaatttggtgtttgctggtgcaggggaaaaatcggagagtggtggggacattctcggctagtgatctgaagggatgtcatttagccacattgcgttcgtggttgccgctaaatgcactagagttcgtcgagaaaatcccaagaactctcttgttcaccgctgctacctcaacaccagggagggagctcgtgacgtgtcacgtgacatcaaccttggcccaggtgatccatatggtcaccacgaaacgtgtacacagagtttgggtcgtggaccagaacggtgggctacaaggccttgtttctcttactgacatcatcgctgtggtccgatccgctttgctttccggagctccggatctgttttaactcgcaactttcagtcttctctccaattactcaaattttcttttatttgtttcttagagaaaatttacacaattttgcgtttttcatctcaatgactcatcatatcgaatgttaacatcacatttacgtaacacataagaaaaatatagggaaatgatataaatagaaaaaatgtcaaagcaaaggaatgacgaatttctaccaaaagaatatcttataaacacaaataaacatgttaacaaaattgcacatggaataatcccattaaggaaaaaatattgtacatggataataaaagaaaacaaagcaatcatagaaattatgaaatactgagagggtagtgattaatgaatagggtactcgagcacggggcgcaaagaagcatgacatacgaatgagacaatttcagttttcgtatataataattccataatcataatttaatcactagttttaattggtaacataaccttaaaaaagcatccactcattatgcgctccactttactacttactctgataacatgaaaaagtatatgtttaatactagctagttgtttgttccgtttccaagcacgctctttcttcttttcagtcatttttaatccgcatttacaataatatttagctattttcatatatcattctatactagctcacaataattacatatgagcacgcttttttgtgttcaaatattataaatcttcgttagttaccgctgctttttataattatgtatactttctggttccaggagactaattaaggaagattattagaggcttcttatacgtgccatatgattatttatttatgtactgtcatggttcatatatagcgatgtgataccaatataccaatcaccaaagttatgagaaaatcacgtaaccagaggtgttggtacatacattttctgttaaaaatagttaagaggacttgtaatcttttgtgtttaactattgataattttttactttattcggtgaaacaatttacgcatgtttctgtgttgtgcttgtgtttcttgtattcttcttgtgtatagctttccttataagaaagaaaaagaagaagattaattgattagatcgagaaagagaaaggccttttgagatagaaatggagaaaggatggattgaatttgaagcatagagaatagcgaacactcactgcaaagttagtgggaaagtcgcgcgtcatacgagggagcaacaaagtgtgggcttttcttttacagtctcagaaactaatgcatgctcacatttaaaaaaaaaaaaaaaaaaaacaattcttgtgttaaatcaagagtggattaattatgagataatctaatgtacattactgttatatgattataacttgacagaccaaataatcatcttaatcagacctgataaaagaaaagagattaatttcaacagtgagaaattaaagatagaaagtacatattattggtgtaaaagttgttgatttaatttaaggcagatgtattaagttaaatatgtaaatgtagaggctgcgggaagggtgaccagctggtctgacagggtacgccggttgtcgggaggaagaacgccgctattggcagagtcacgcggggtaaccggctggcggctgtagccggtcacagagtgtattaatatggtcgtacaatacttgtagagtgctttttcctgtgacggtcccgtttattccccacaccctcctcgattctttcacttaaaagtgggggaaaaaggtaacctgactcttagaaaatttgaatacaattgtgggtcacctcatctcatgtagtcatgtctatacaattataaatacctctcaacaaacccaaaatcgaattataagccttctctagctagaatttgaagcaagacctgttcacattagtaaaaacaaatatatagaaagaggaaagattgaagcggaaaacgggacaagacgggtgtgccgttgtggatgttggggttgggtgtggaccggcttcaagccgacatcaaccggctcctagcctctcttttccaccagggagtgctggacgagcagttcttgcagcttcagcagcttcaagatgagacttcaccaaactttgtgtatgatgtcattaatatctactttgatgaatccgagaagttactccgcaaccttagattattgttgtgagtttcttcctttgttaatgtgttccatagttgtatgttgtttggttccaaaatgtatacgtatatatatgttatgaatgatgacgaatgtaaataaataaatgaacaggatggatagagaattctcggactataagaaaataggattacacctgaatcagctggtgggaagcagttcaagcattggtgctcgtagggttcgtaacgtctgcgttgcctttcgttctgcttccgagcttagcaaccgcccagggtacaaattaaacgagctatatatatatatatatatatatatatatatatacttctttgtattaatatataggtcaatatttaagtcaatataatgcttcataaatgtgacgatgcttcaggtgcttgagaggactggaggtagtagagcatgagtatcattacctcaagaacatgatgcatgaactcttccaggtacttacttgttttgttaatatattactcacattcacacaaacagaaggcaaaaacgtgagctaaatatacacatatatattgatagtaatatatgttaacaattatgtgggatttaatattttgagtggttgcagctggagcagcagagaatattagctgcaggagtcagatatccaatgtaaaattagaattttgtcataaaaatcagagaaaacctaattagtgtgtgatgatagtgtgttataagctaccgaagcgaaaccctttagtttcttctaatgatgttttgttgttaatctctccataaattcgagatacattaccttttgtattttcaagtgagatttacccatgtcaaaagtatctttacatgaacataaaacatttagtacccaaaaaaacagaaaaaagaaactgggctataaaatgaccgacagaaacggaagaaagtaggcccaatgtacggcccgttcatctcaaataaatgatttagttttgtttttgtttttttcattttagcaaagataacgatttctgagcaaaaagaattggaaaatgatagaatataaagccgaaaaaatattctgtgtttattttcaaaatcttagaatcataaatgtgtctcgaatgtaaccattaactgattttctggattgtcccaaaaaaaaaaaaactgattttctggataaaattagtaaagagaaggggacaggtgggtgttgcttactctagtagtcagtcatgaggaaagtaatctgaaaaaaacgagtaaggaatagacacgtgtggcttcatccctaagtatccgtttttacttaactaatcaatgcacgacttccacgtctctcttttttttactagtataaaactcattaaatgtgagcgatactttgctcgatcgaacaagtcgtatctatataatcgagaaagaggaaaagatcttttaaaccccaaaataatcaatcaagcaaataagcaatcaatcggaggaagcaatgaataatctcccagaagattgcatcgccaagatcctttccttgacaactcctctcgacgtttgccgtttatcggcggtctccagtatttcagatccgccgccggctccgacgatgtctggaatcatttcttaccggctgatttccccgccggctttgcggcacctgctggtcttcccaccaggaagcaactcttcttctccctcgtcgataaccctcttcttatcaacggcactcttttggtaattaaccaaccttcttcttttaatcctttttacattcatcatcacatctgtttatcggttccgttttctagttttgtttttatacagccaaacgttgttactctttaagtctagaaattacactagtagtgtccattgttgtccgatcctgttcttggattcacgaaaatgtgcaaaagctctgttgtgtgtgtcaaattgtttttcataatcttaattagattctgccaaattcaaattctgttccggcaaatctaccacctctgtaacttgtagtcaaagacctgaaacctttgtaatcactcttattttagggttttatgtgggtttagactttatcacttttgagatgtcttcaagataattggaatgttttatctttctcttctttttattgctgtgatcatatagtctgactgaattgtataaacagagcttttcgctggagagaaagagtggcaacaagtgctacatgatggcagcgagggccttgaatattgtttggggacatgagcaaagatactggcactggatctctctccctaacaccaggtctcctttttttctgtgttacaaactagacttcctcttctgcattgctttattataagatactaaatgtttttgtgtgcacaaacaaacaggttcggagaagtggctgagctcatcatggtctggtggcttgagatcactggcaagatcaacattacccttctctctgatgacaccctctacgccgcttacttcgtctttaagtggaaccatagtccttacggttttcgccagcctgtagaaacctcccttgtcttggctgacaccgagagcactgacaatgttgttcagccttccatgattagtctcatgcaagattcaggcggcgaagaaggtcagtcccctgtgctgagaagagacggttggtacgaggttgaattgggacagttctttaaaaggagaggagatttgggtgaaatagagatgagcctcaaggagacaaagggtccttatgagaagaagggccttattgtttatggcatcgagattagaccagtgccctaattgtatcctactcctaaatacctttgcggtttccagtgttctcttgattctcaaccctgtgttgttatcttctctttccctgccttcttcttcttttccttttctatattgatgcagaagaataatgtttttttgaaaaatgtttttatatgatcagctttttgattatgacattactatatatgcttgaatttttgtcttggtttgcaataatgtctgattgaaagagaaatacaggcaaataagacggtagtttagcagtttgtgtttatatcgttgttgtattaacgcctaagctaaaaaaatcttcatgatacatgcatgttaatatgttatgtgatttgaagaagaagaaaaatatgatattggcacggttctaattttgagaaaattgagagcacatgcattagatatgatcattctcatagatagtgctggaggttagagaccgactttaccaacgtgttcattacgttttctactcgctttccatttttctttactcaatcaggtcagatcgaaacgttggactcatagttccaaaattagctaaaattagatacttatttattaaaacaatcctgtacttttgacctaattagatatttcggcaaaatatctaacaaatatccccttctgatcttttggtattttctcaaaataaactaatccaaaccgaaactaaaattatttgatggaacgtacattcgttaaatgaatttcgcagacataaataactttactttattaaaagagagtaataaattggaattcaattatataaaacttctaactctttattattaaatgaaagttataagattttcacaatccatgatactgcttaaaaaatttcactgcactgttatcatacaaacaaagaagaaaatactatgcaatttctgtaagaattgatgactgatgggaacgttatgattatgttatcttcaactatggagtgaggatctttatttccatactatacaggccactcgatgggtctatttgaaataatgcaatagatagatagatgtatatatacacacacaacaaatatgtgtattgtttatacgctccgggataaacacacattttccacacttttaattcgttaccgtttcaggaccaattttaaaaagaaggttggtactatactattgactagctagctggtcagggaccttgatggtacatggaagtttcatattttatacagaaacaaaataatagagagtataagaatatcaacgacgagatctgagaagatttgttttctcttttttttgttatcaaatatgagaagattttgtaaatctgtaagttttaatttataaaagttgagatgcaatccagtgactccattcttttaaaatccactagtacttagttaccctaatgttaaacgttgaaaaatgagatttagattagttaacaagactttatagttaactaatcatataggggaatcaataatatatatgcaacttttgatgaccacactgttagatgctttgtttaaataaaactaaagatagaaagaaaagtacccttttgatctgtactgattgtataatcgttctataatatgtggaatattgtaaagaatcgaaaaaaggagtgaaggagaaacagtgatcggaaagaaataagtaatgtaaggttataatgttgcctaagaccgtcaaacaagaatcttcaaaagtatacacgaatatatatgtaacaactcaagtgattaatatcaaaacggaaaaacaactaaatgttgtaaatatttatgttgtttgtcaacatgcgagtttaaatatggatggtaccacatggatgataatgacaacacatactaatatatgtcttggccaaatgtatgtctcctaatagattgggagtaattgagcaattattacctatatttgataagatatgtcattatgtgtagtatcatttaacaagctataattaacatactttatatatactggttagagtaataaaccaaaagctcacttcacccaataagtgaaacagaactttaaatacgtataagccaattcaaagaagaagaatgaaaaatattgatagttaaaacacgaaatcatcatcccctacgtttgttaaactcttgaattgtatcgcacataagatatgtttaacgtgacgtagtaaaaaataacggtgaagaagtgaagcgcatctatatgtacttaaactttttgaacataagttgaagcgacgagtcagcggcacgtgtcaagttagcattagcttaaacagtaaaattcgcgagtcgtcgtcttataaatgctgtactcgttgtcttcctttccccaaccttcactttcctctcaaatctccaataagtaaactctctcatcgaaagcttaaaagcatcatcaccacaagaaagaaaagaaaagagtagaatcgaacatgaaggggggtttgcttgtggacgatgaatttatacacggagaagaaaggagcctgactgttcggaaaacatctctgtttttcgccggcgatggtttcacagtttacgactgcaagggaagtttggtgtttcgggttgactcttacggtggtcccaacacccgcgacaccgacgaggttgtcctcatggacgctcacggccgttgtctcctcaccctccgacgaaaggtgcctccatttttttaatttgattctcttcattagtttgtgatcgaatttgaaagaaaaaaatatctgaaaggggttttcttggaattgactttctcttaactcgctgggagttgaaacttactctgtttttaaatttccaaattggtgaaacagaggccgagtttgcgacggagatgggaggggtatctcggggagagatcggacggccagaaaccgatcttcggggtaaggagatcttcgataatcgggaggaacagtgtgacggtggaggtgtacggggactaccagtgcagcgagtacctgatagaaggtagtttcggggcaaggaactgcacggtggtggaggcggagacgaggcggaaggtggcggagataaggcgcaaagtggatgcgtcaacgaacgtgatgcttgggaaagacgttttctcgttgaacgtgaagcccggttttgatggagcctttgcaatgggattggttcttgtgcttgatcaaatctacggcgacgatctccttgaggttggtgaggaacaggtgcacccttccgcagaagatctctgatttgatttttcaccctttttttgtttttgttttcttcttttttggtgggacgcaaacaaaatcgagtggaaaaataataattattgtgagtttgtgtcggtttgaaaggaaacgatttggacaaattatttctcgtcattcccatgggctgttgtaatctggtttgaatttcttactcagttacagctgtttgatttgaaagaaaaaaagggtttacgaaaggagtttagttgtagataaacattacttttgtgtctaattcattttgcttttgttggtgagttaggcgaaaagttacaacttgtatattagcttgaacgagttgcaaattcaaaaatatcaaagcgaccaaacccttaaaagtgttccatctatttttctctctccattgacatagcctttataggacggttcaactataatactccaaatctatgggagatagtgatagcttagaaaaattgtgtcaaataagagtatatgttatgggtacaaactaccatacttaataaatcctcctgacttagttacaatggaaattgtcgaaagaaaaagaaggaaaagtttcatcttcttaaaaagaaatattggacggaaagcatgtcggtgtatgaccaaacagtagtaaatagttaagcagacaggaagccttgattatacgaataacaagtttttttggttcatacggtgatcgtcttttgttcacaaaaagaaaaaacttcttcgtctcttatcttagctggatcataactaactatttagatagacaaagttaaagatcaaattctccttgcatttaagttgtccacacctcttttctagtataatcattttcttgtttcgtggaatggtcacattgaattttaattttggcccattagcccactaacatgtggaggttaccaacgagaaatcagatgtttaggcccaagtatataagaacaagatatctttgactttaactccaaacaaaatcgatcgatctgtatcatcaatttcatcatacttttttttaacaaacaaatgcctaatattttgtctatctcgataggacatgggtaagtttcatactttataatacaaaaagacacataaatactgcaaatataagtacatacccttattatgaagactacagaacatatacaaagattctgaacatatattatacacgcatattgcatttgagtatgtgtattaaatatgcttctatatatgttatttacctaaatacgaacattcacgaaggtgttcatatgtgtcttaggatgatgcggtaatagaagtgtgttggggaaaatcacggaacatggtagttggaggcacatggccagtttcatcactcaagttctcttcttcttctcctaatgcttcatcttcttcgtcctcatccacatcccacagaaaccttgcgtatgaagcttgcacataactgcaccattccatcatcacaatattgttatcatcatgaagtctttttccttaattttcaaaattggttcaattatagaaaggtactttgcaaaattaccaatcttccggggacatcttgacggcttgcttatagtaagagtgggctctttgacgatcttgatggttgtgcaaaatgagatcagcatagagagatagaacgtttccatcgttggtgttccccaaaattgctctttcacaatactcttctgcttttttcatgtctcctttcacctgttcatatacatatagttttttttcccgatgagaacgtttctttcctctcttctacgcatttccctaaaactaaacatgaaaacttctgatttttaattttattatttattttcatttgtcacgcaatacaatctttacacgtggatggatcttcaacttattaaatatcctacataaaagacagtaaaaagatattttcctttttgtacctctttcaagaacttggcgtagtttccggtcaaaagcgagtttcctggattcgagtcgatcatctcccggtaatacgtgtcggtagcgtcctcactcctaccgccgtccacaccacttccaccgacaccaccgccgccgttacaaatattgccgccgctgcctcccatcccgccaccaccaccactcacaagagtctccagacgatcattactactggccttatctccctgtccagagctcgagaagagcctctccactaagaaaggtgatgaccgatccaaagtcttttttgtgtagcgtgtttcatctaaagatgacctgcgttgcctgcttgatgttggagttttgtagctgtgctcgttgctttttgatttaagaataataatctccttgttgtcagagagagcttggtgcagctgctccccagtgtgtccatctatggactttgatgagaaaagagacaatgatgttgaccggcgccagagctgtgactccggttccggagacgattctctcgagcagtgttgtggaagccacgagttcagtatcggagcagatgtgcttctcaataacatgatgatccactcggttaccaaatatttttaaatttaaaactccattaaacaagaaccactcatcagtatctttataatgtatataatgagagtagtctaccagagtcttatataatggtaagccgcataattaaatttagactgtaaaagataagtgtatatattattggtctctaagttgacaccagccaagtgaaaaaatagtgaaattattctacgggaccatggattgatagaaaaagatcggattaaaacacagccgctagtactttgacacgttgaccataaccacatgggcaaatgcgggacccacctttcactcttttgtcgacatcattacatagtagtttagtatcctcacagaaaattgacggtgctgcgttgcgcatgagatggagacaaactctaaatgtaactgtcagctacagtgttatcttggatcgagacaacagtcgacacgtttaagagttcagctgacgaatgccgacaaagacggagacggagacgttatacggcaagcggtgagatctctctcagtgcttcacattcatcatcactctcatgctttttatcaactacgggctctgttcttttgtcacgctatatggattaaatgtattcggtagataataacgttttgagggtttctttcgaaggtttgagaagataaagatacgtgcatgatccactttacataagattctctaggatcatttatggagctgataaatactgcattacgaatctgatttatgaatattattatatgaatctgattggtcctatatatcccatttttacatcaacataaggaatcacttggatgtgatgcctgaggttgaaatgttcgatattcaatttcttcttattttgcggaggcgcagtcgagttattcataaatgtaattaagatccgatattgagacggtcgttatctgacagacaggtaaaccaaaacgtacggtgtgggattgtgctttgatgacttgcgaaaaggtcttcgttactggaatttggaactttatgcttagtaggcccatatccttatttttctattccggctgctctttgtaggcccataacaattcaggcccacaattagtacgcatgtggatccgtgtgccattcgacatgcatgatacatatagatgagatgacaaacacatcatcaactttttttcctttcttaatacacaccaatacaccatgactatcaatgaacacatgccaagccacgagtaaatgtttacctgattacatatcgaaagattgtataattcccgacaatatccaatgaaccaccatcatgatgccatcattcatgggtcagatcatgaacatccatgagaagcaagacactagataaataatgtatatatagatactattcttaaggttcaaatactctatctctacatctacatatccactttaccggatagtatggttcactatcatcatcatcatcatgagcaccacgaatgtcaaatagataaggaaggcaaggcttgcagttccggcattttgtcgcacacacgggaggctctgaacccataaccgattctttcattctttgttgatgaccatgtgcccctacatgcatgtacattagtatatacatataatcagaaagggattaataaaggggcaatatttcagggatttggatatgtatatataccagatatgcagtgtagagagagcagagagaagaagatgttagcaacgaacagtgcagctccaaaaccacatcgtttatattttcttgacgaatccatatcatcacaattttctcaaaacccaaagttacatagcatacacaagctttgggacatgaatacatttatataggcgcgtgtaatagatacactatattaatatacatttgcatgggaaaagagcatgccccttatttccattgcccggctaagctttttttattttattttattgaaggttatactaagctgtatgtttcatgtcggtcataaacattaaattaaaattacgtctaaacaattatttgacgaaaaaagagttgctagctatataaattaagatacgtcaaatggttgcatatacgtatgatcattctgaaaatgatgtatcgcatgatgatatacgtacacgaacaaattaaaggctaattaatcgcatgatgatatccgtataaccttcacaaaatcacttagtttgggaccaaaaaatgtcataaagcaaatccaccgaattggcattgtcttctattactgaaaccaaaatcataatccggtcatctcgaaccacgatggaagttggggacgggtgaggactgaggagacaagagacatgtcaaatgatgccaattggtaaaaatgacgaccaatagaagataggtaaagtttgtcggagaaaaccaaaagcatttacgttaatttattgttgtctctttacgtttattcaaaccttttcactttggggaaaagtcatgaataccaagacattactaagaaattaacttgtgatctcttcctttatcacgtacagtttggtaacagtaatttcttcctagtgtttcatttaatttctatatttgtaatataaagaccagatgtcaaatccattgattgtgaatcttgtgatggcagaagtgatcaccaattttgccgatcaacaatatcaatttaaatgaatccgaaggttttgtcaaacaaaaaaaaaaaaaggaatctaaaggtttagagaagggatgtcatttcaactttttctaaactcaaaaaatgatttcatgagattttctcacaatccttgtgttttagaattttaactaccatttaattaggaaacatctaaaaaaacatttaaatttagtaatacatgtatttaagttagattttattggtagcccattttgtaaaatagtcaaaacttataggttgattcgtttcgtttggttgattcgtttcaagactttagcaggtttccgatttcaacgctttcttctcgatttgaatctctgattaggatgtcgaacacttaacgttgagagcgagattctgagtgtttgtgctctgatgtgttctctttatcccggaaaacatgttcacaaatgacaaagacagaggattaagcgactcataagattgaaatctcctactgagttctaattttggctggttaagttacttggcggagaaagattcttctatatattgatcatactttttccggctctcccacttgtttccagttttctgaaaaagataatgttctattgactgctgcgaatcctaaagtcatttttgctgtggttcttggattgagtcaagcaatgtaaaatgcggcgggtgctgattcttgaatcattgatcttcatgctaaacaagacacgttattttttgtgataagagataaaacagagcaacttaatatcatcatacttcttgattaatctttttattaatttgaaatattaacttcgatttaaaaacaaatgcctatttcctttattgctggaaaattcattgaactttcaagaatcagtacacagaatccttggatggcactccgatattagaggaaaattaagtctacaaatgaaatacattcagagaatatatccataaatagatacctaaaaatttaagaaaaccaaacagagtgcatgcatttatatccaatgctgttatgttactaatgtgatatttgaatcaatcccttatgttgtgtgtttatatataccttaagacaatctgaaagtaatccactattcaactctgcttagatcgatccatttctcgttaaaatggtaagactcgttgcctatatctactaacattgaacctgatttttaaaatattaatcctctttttgtacatatgtgtaggattggtttttgatcgtactcgttgcaattttaggatttcccgggttaagctatagtgaatcagtgatgaaatatggagcggtcggggatggaattgtcgatgatacatctgtaagttattggtgtatatatattatatatcagtacaagcagcataattgtttagtcatcatataaaaaaaattaaacttttgcatggtatatgtgggcaaaaaaaaacaaggcgttccaaaaggcgtgggaggatgcttgtaagggaagctccaaaatgggaagtgtaaacgtaccagcagggaaggtgttcctcctcaactcccttcacttcacgggtccttgcatacccaaacctctccttttcattgtaaatccctccaccactttacttgattgatattacatgaatactcgaatatgaacctactcctccaagttaattataaagttacttttgctgatatatgtatatatagatcgatggagagatgatagcgcagagtgatccacagaagtggggaaatggtgagaacggggtaataccatggctcatattcgatcaagtagatggacttgcaatcgtagggcgcggcttgttggacggccaaggcaaatcatggtgggatattcattgtagagaccatcccggacccgtaagtttccttttttttaactttttatttttcttgggttataatgtatcctaacaaaccatctctatgtgataatacattttgtaacctataacgtgtcacagaattgcatctgccttgcaccaacggtaagtttgctatttacaaaaggaagtacgtagtatgtatataataacttggacgtctctataactatagatatatttctcgcagatgatgacatttagcaactgcggaaatgtaacattaaagagtttgagatttagaaatagtgcacaaacacatgttcttgtgatgggaagccaaaatgtgtatatcgatgatatcaaaataacatcaccggaggctagccctaacaccgacggtattcacatcacatcttccaccgccgtttctatcaatcattctgacatcgccactggtatatttccttacctaaccatataaaagatcaaacaaaagtttaatttgtttatttattctcacaattaattaaacaggtgatgattgtgtgtcgatcggagatcaagtgaataatttgaatgttacttttatgaattgcggacctggtcacggtgtgaggtgattaccatctccttatcgacctcgtaatcttatatttttcataataaaaaaatgagaactaataagaaattagagacagcattgggagtttaggtagaggaggaacagaggtaacagtggaaaacatacgtgtgtcgcacgttaacttcactggaacaacaaacggagctcgaatcaagacttggcctggaggaactggttacgtccgaggaatcgagttcttcgatatccgtttctcgtctgtacaaaaccccatcatcattgatcagttctacggttgtgcccctacatgcgttgagactgtgagaacctttttctttctatctttcaagttaatattaaatgtaaatgagctaatgtttgaatgtaatgtatcagatgaagggagttcacatagagaaagtgagatacatgaagatgagtggaacatcggcgacaaaggtggctatgaaactcgagtgttcaggggagagtgttccatgttccaaccttttcatgagagacattgacttatctccggccgatggtattgattctgtctcctctctctgctcttttgctcacggctccgcacaaggcatcattcgacctttatcctgtttctaactattttagtaatttgtaaagttttggggtgtaaattgaattactatgtaaatgcaggggtcatattggaataaacaacaatgttttagttaaaaggcctgtataacaatgcaggcccaaacaaaaagatatgagcccaatagtcactgaaattgttttctcaaacccaaaaaacctaaaaccttaaacctccgtatgtgttccgtcgttagcctcctgctaatctccatctcagatcgcaatttctcccttttccggtcactgctccggcttacgactatagcgttccgagataaagttcggctgtgttaattaaattcgccgtcggagggattttacggatatggctgttgttgaatcgcatggggatttaggttattgtcgattgaggtaaatggatgtcgagggtttgctcaactcttcgctctccttatctttgaagctggttctatagattggttagtagatcttacaaattgcaaagattggagatttgggggatttgaataagctacatgttattcgggtatgtttaggctcgagggaggccctggatcatgctatctctgcgacacattcgcagattctgccattttccttcctctgcagccactggtattgcatatgtttcaacagagtccaatcagatccagggtttgaaaccgctcgaggaacctgcccttgtgaagcttaaatctgagcgagaccctgagaagctatacaatctctttaaagctaatgccactaaccgtttggtgattgaaaatcgatttgcttttgaagatacggtctctagattagctggggcaggtcggcttgatttcattgaggatctgcttgagcatcagaagacacttccacaaggtaggcgtgagggtttcattgttaggattataatgttgtatggcaaggctggaatgacgaagcaagcacttgatactttcttcaatatggatttatacggttgcaaaagatctgttaagtccttcaatgccgctcttcaagtcttatctttcaatcctgatctccacaccatctgggagttccttcacgacgccccatcgaagtatggcattgatattgatgcggtttcttttaacattgccattaaatctttctgtgagctgggtattcttgacggggcctatatggcaatgagggagatggagaaatcagggttaacaccagatgtagttacatatactacacttatatcggcgttatacaagcacgagaggtgtgtgattggaaatggattgtggaaccttatggtcctcaagggctgtaagccgaacctcaccacttttaatgttaggattcagtttttagtgaataggagacgagcttgggatgcaaatgatctgttgctgttgatgcctaaactccaggtggaaccggacagcataacatataacatggttatcaaagggtttttccttgcgaggttccctgacatggcggaaagagtttatacagcgatgcatggtaaggggtacaaacccaatttgaagatataccagacgatgattcactatttgtgcaaggcaggaaattttgatttggcttatacaatgtgcaaggattgtatgagaaagaagtggtacccaaacttggacacagttgagatgttgctcaaagggcttgtgaaaaaggggcagcttgatcaggctaagtcgatcatggagttagttcacagaagagtacctcctttcaggtcaaaacagttgctctcccttaagtccattttgtaatgtttacatgaaatggaacaaatttgctacatgtacacgacaatgcggccaaaagaattctttctttctttctcctgagtttattttgtatagctgtggtggaactggaaatgggatgtagcctcatattaggaggcacacttatcttccaatcagattcaactatttgttgttcaatgtgaataaagcttaggatgatttggaaacttcaatggagggatacccagtaagtcatggatgcctctacaatcttaagttgtgatagcacagaactagtttaccttttgtaatgctacttacaaaacatgttgttgatttcagctggagagcaaaatggcatacacaaagcagggaccatgtgctgaagaaaccaaaaggatcttcgtctgacgatgcaaaagctcttgagcacctggaaaaatgagttatgttgtaagcttcatctagccaaattaaaagcactaaacatataacaaaggatatcaacgttgatagctttttcttgatatagcacgaatgtaaacaacagagaatagaacagagacaacattaccagcaatgaatatttttattattatgtcgaataaatacattttcccacaagtgacagagcaaacaaaattcacatatttttgtctattacactttggtgtcagactgacttgttacgtagatttatggcggtggattataacattgtaactttaaatatcttttaacgtaagaaacaaaactccaaaattggtgtttatttttaaaaataaaaatttgagggggcatgtatgtttgtttagttgattcacgtgttctttgtgtctgaaaattctgaatttgatgattttgaaaaaggaaaaaaagatacgaggtatcctcaattccaaaaggatgaatgatacaactcatatatacaagattatagtaaaaagaagggatgcatataaagaaacatagacatcatcgccatccatcctcagatcagttccgtagtttactggatcacgacacacacacatatacacgtgtacatataagccattcttatcaaaatgaccaccttcctcctgaattctcattcattatataggcgtatatttcggaattctaagttttgttgctacgatcgagccagcgttctgtttctgtacgtctctctgggtaagaaagaaaaaatgaaggacgaaacgggaaaccctctgcatatcaagtctttgaatcacatctctcttctctgtcgatccgtcgaggaatccattagcttttaccaaaacgttttagggttcctccctattcgcagacctgactcttttgatttcgatggcgcgtggtacatatatacatacttacctacatggagatattatatatatatttctctttaagaattgttaaatttcgtaattatatacttattttgtgtgattataggttgtttggacatggaattgggattcatcttcttcaatctcctgaacctgagaaattactcaagaaaacagagattaatcccaaggataatcacatttctttccaggtaccctttttttttttactttatcattttgaccccacacctttttaaatgcctcctcgctaacccctttgtttaaattggagctcaataaactccttttaattgtgatttgtgagaccaaatgatggaagttttagcttttcagagggtattaggcagccaaatgtgttgtttattagtagtacagaaatatatttgatagaagaatgtgtgtgttgaatgcagtgcgaaagcatggaagcagtggagaagaagctcaaggagatggagatagagtatgtgagagcagtggttgaagaaggtggcatccaagtggaccaactcttcttccacgaccctgatgccttcatgatcgagatatgcaactgcgatagcctccccgttatccctctcgctggagaaatggctcgttcatgctctcgacttaatatccgccagctcgttcagccaactcagatccacccctagttctctctgtcttccctaatttctgttttcgtaaataatttcaagtgtccatgtgattgtctctttgattgcgtgtgaatataattgcatgtaataaacagctagtggtaagttgatgtgattcctcaaccgggaaaatgaccatttgcttcacactctagtctctctctaccattatttgagataccaaactctctctctcttttgttgttatgcttctaaaacatgtggttatatgatagtaagaaaccttataatacaattgaaatcgcctaagaagcttagagagataagtaacatatgttatctgaaacacgtgacatgagacatctattttttctgtaagtggaatatatcagagagctcctctagggaggatgttatcgcactgaagagaaagttgtcgccggaagttttggatgaaagcttcggcgcatttgtcgacatcatgaatcttaggcttgctctctagatgacgactaccatttgtaagggttgtcaccgattttctcttctctgttatgactttggagttggtactgtgcacagaaagtggttgtaaggaactcattttcctgatctttttatgtgtgttttgggatagttggatggtggtgagagttctgattttaagggctgtgtatttataggattgtttgtatgcctaagtcttttttatccctacggaagcaactcttgaattattgaaaggaatagataactaactaataagaatgttgaatttaaacgtttagataaaatatcgcttatattattagtaaaccatatcctttcaacacttatccacttaaatctaaacccagtaagtatcagcatttaattaaaccaaatatcttgcaacttctgcttttgtgatattctctagatcatatttatatatacgtttctatttaaataaggaaacgaagcatcaaatctaaaggttctctttgcaaaagggaaggcttacatgaaatctaacctaacaagtggaattgattactcttagtcataaggctacaagtagaacctaacgactagaagataagccaccgaatccgaaactcatcatcgtccaccgccgtcgttttcctagctccgatgacttatttattctcttaaataacagatatacacagaatgggccgtttttcatattcatctttgtttcgatatatttatgaatgggctattttgacccaataattagccctttaacgttcaaaaggcccatacatattccgagattattcgttttagtatgtggctattacagatgtaccccttctattttttgtttataaatcattgcacgtgttttgaatatttttcgtaattacatgtgttcccctatattttggctcattacataaatttctcatagttttgattatgcattaatactaagattgtttcagctattttctctaagtttttttggttactgatccaaaggtttgacttgatttttctcaaaacgagttttctcttgtcataaattatataatcttcccaacaaccgtgagagagctctacatccatcgtatggctcaaaaggtaatcttgtgagctggaaatgattgagtgcaataagagagaaactcaatgataagggatggactggtgaactgaatttgccaaaacatgactatatcataaaagcatttggcgtgtgcacaaaaacgtggcaagattttcaatctgaaaacatgaattcaaaggtatgcagatgtgatcccggactgaaccgactgttctaagaagcttgtgtcatctgaaagacaaggaggagggtacacttgacccgaactagaaccataagcttcccaacagaaagactctgtgaaaccatcaccgtttgatggttcaagatcaatgtcttgtagaagtatgttgcgacatggtgaactatcgctgcaagagatcttgattgcttcctttgatgctgaggtgcccctcacgtgaacaaatgagatgttctcaatgctaatagctgatgtctgcagtttttgagttttagacaatttttcaggttcaatattgagctacaaaagaaagatttggcacaagttctttacctgattcgcacacggcttcctagaatcgcagtaatactgatcgatgatgatggggtttgacacattgttcatcttgatgttcctaaagataatttttgagaccaaaccactccctccctggttgaaagaaagaggatgcaagcaagttaagttcttttcatctcagaacgtaaatgggaactttgataagatggaatcacctgccatgttttgatccgaacaccattcgcagtgtcagagatgatggccgtatcaactgttatgtctctaacttcttcccaagattttgattttcctaggcttccaatgctacaacaacaattttatattagattatgcttagtctgtttcttatctgtcttggctttggttaccttatgccatggccaggaccacatataatgttgctgatggagatctgtgtagagtttttaactatcgaaatgcagtcatctcctatacaagaaaaacagatccgattaatcagcaaagagcaaatattagattcaagttctggttaagtacactgacctgtgctgacagtagtgttgtctataacgataccacgagagacgcttatgtgaattccatcagtattgggactagtagcaggagctatgacctttaaaccagagatggtcacacggcgacagctggttaaggcaatgtgcatttgttgactatcaatcacattgaggttctcaactctcatattcttgcacttgtggaatgttaaggcctacaaaaccaacatagtcttactttaatagagagtaaccacaccaccaataaaggaaatcaattggatgcttaccgttggagcacctcgacaaggctgcaaaagaaatggttgaaagaaaagtgagaattcccttttactctctgaagataacatgttgagaaagaaaaaagaggcaactaacgttggaatgattgtgtttgcaagatctttcccaccattcttgccccatcccgttaacagtgccgcctccttcaacagttaagcggctcaaaccatggaaatatagccattttcggcggttaagaccttcccaaacatctggatcattgggagcaatgattgtaccagagatctaatggccaaaaaagagagcagaaagcaatgaagacaacagaacaaagacaacaatctgaaaatatccacaaagattctaaatacccctgtggaagggaaggtttaacctggagtgtgagtcttgctttacaaggtccagaaagatcaataggccgaaggagacaagtgtaattttcaggcaccaagattctggttttgactttggaagaacaagctgtcttccaagcatctgcaaacgcctgcgttccattatcacccgacacaaattatataagtatctaccgttgctgtctgatttcctaaatcctacccatagattcaagatttcacagtgaaaagaggtttctcgagggtttagcgaatcgttactttagtgtcgtcggtgacgccattgcctttggcaccaaaattgccaacgtggaggagccgttcggatctgggtcgggtcgagcgcgactgtctccgcgggagctggaggagcgattcgaacgaattcgcgtttgcggtcaaagcgagtgaggaggctacgactagtagtaacaaaagagtgacaagagtaccgccgcgtgaataactcataatttagatttttaatttttaggaaccgaatggatttatagacattaaactcaagatactataattaggcttatgtatgattttagaataaacaaatgaatatagatagagtctatttataatcagaattacaacagatctagattccctcctctctaccttgagagtgagatttagttttcctgattgtagtgattatggtgaaatgacgttatgtttagccacaaagaaaaatggcaagatagtttctagttttcaggggatttagtaatgacattctttgaaaattttccatacattattgattgattaatgtaggtgatcaatcatataatcaaacagaaaattgcaagatgaaataaatgtatgtgttttgacccaaaaaaaaaaaaaaaaaagaaataaatgtatgtgataaacccttttatcactaatttagaaataaaaaaaaagtttgatggttatgggctaaagcccagataatcagggtattatatgttgcactaaactaagcccatatgattacgcccaataaaacttttacaatggatggactatgtaaaccttccaactttcaagaaacattctcatactggtatatgatcactatatctatatctcacacctcacgcaaactagtagttatttacgtatcaaacaaataaattaagtgtttattattggttgcaaaatatgtgtatagttttatttttcacttttttttttgcaaaggctccaactttttggaaaaaaaaatagcagtggatgggtgggaactgtggtgccatgcttgatttggacataacacagaagcgagtccgtgagggatttgtatcggctgatgaaaaattaaaatatatttaatcagaaattagagatgagaaaatggcattggtcctttatcctaggaatgaagaatctgatgttgttgcaactaatttgtcagaatgtcaggctcaggtccactttagccgccgcagtcagctgcccagttttgaattcattaagattatcaaatttaattactcgatggattaatcataggagacgaagaagattgttgatcctctgctttaatcttacttggaaatatttggaattctctcgggaaagaaagagagatagaataaaacaagaatatacatgaaaatctaagatcagtctgcaacaaaaacaaaacaaatataaacatatatatagtctctgagtttaaacagttttaacattaaagcacaaacaaaaaaacacaaacaaaaacagaaagaaaaagattcataagaagcagtataagtatatatactctctttttgttttgttttgttttctcatctttgtgtgtgttcttcttctttactttagactttagttcatgcctatctggatctacgcttcgctggccttttcctctgattaaccttcttccccggctgtttcttcccgaaggcagagcagcacccaaacgccgacagtctcggcgacggcgggtccaccgccggagacactctccctgtgtttcgatggtggcggatggctcctcctccgttggatcgactcctctccatacctccgtcagttctgataggtttgagtccttctccggcgataggtttggttgtctgatcctgtacttccgacgtaatcagcttggcctgttcgtcctgttgtagagtctcgcctttccggtcgttggccgcttgttggcttagctcggcgatgagacgatcgtcccagactatacccgaagagccctgtcgacggaaagagatggtggatctctgaagacccgccatggacggcgctaactgttcctcctccgtttttttcttcttcttttactctgttttcgtcgtttttgatgtgtgttgctaaaagtggttcatcattgtgtttcagactagttcatttcttcctcctctttcttatctctttattagaaggcacttgtgtcttttctaattaattttcttttgtcgtcttattatttcaattttatatgttttttttcttctggttctcgaattatccaaccaaatataatcgcgattatcatgtttagatgcgtaatcattgtattttatttgttacgtattttaaacgggagagaaaaaactgggtcaaagcagcgggtaattatgggagtagaatagtacaaacaacgtttttgggtggtatgtgttgaaatttcaattatctttttttttaacattaaatttagctatagccacttaattatctgccaaaaatgattatttttcttttcacgtttcaggcaaagatcatcgcatagcatatagttttatcaaccataatccagcatggcttaattttttttaatatttcttaaggaaatcaagcgttggtgactcgtcgttgttcatgcttgatttggttagttcaaagttgaaacttacaagtattagtagatgactgattcatcgagttttaaaataataatcacgcaaaactcgaacctaatatttcctgaaatataatggctcaactttgagaggtgtggattattttattttgtaagatatcttgctatatggcttgctggaccatcccatttgtgtaatgtggagacaatccattcatgtgctacttttttcatatggacaacaaaatttgcgtgttcatatcgtaattaatccccaattaaatctacatcgcaaatctaatatacccatgcatttcaaatctcgctacaattatggaagtccttgagttgattattgaagcagctaaaacgtaagcatgcgaagaaaacggcatttagctttaaaaatttgatgattgtcagaaagagaaagcaaataattggaaaaataagagcgtcttatccgtaagtgtagatttgatggaacaccaaatattttctatcaattttttttggtgatggttattttggcaaaaccaacatgatcaacgggttttttttttgttaattgttagccatctaaagatatagtgcatataaacaaaacaaaataataagaataaaagaaagtgacacaatgtcaatcgcatcagtaccagtcaaatggatcatccttatcctcagacccaaaagatttacttacattagggagtagtattcggatacatgtacacgcatataacttccaaatgttgaaagatgtataaaaacatgttagacatttaccagtgacttaaaaaaatataagtgatttatggtagtatatatcacactatattatgagtcatgacactcaaattcaaaatccgtttagtacaaaaggttacaagtctagaatcgatttttgtaatttttttagtatatatgacattggtttgactgtgttacaaagtcaaagtaaaatcccaaaaaaagaaagaggaatattttggttctgagaaaagacataaaaaaaacaatagagaaaccttgtaaaatcccgccaaaattttcacagaacccctaaaaaagtttgagtgttgccgccatccatagatttattccaccatcttcatctctggaaatccttcgccgccgcgagaattgacattgttttgattgcatataaatctccgcaacagtatggtacgttttgtttagatctacggttttgttatcatccgttaattcggcgacatcagcaacgatttgcttcatccacaaaccgaataggttcggtttaaacataagcctgggatttgagtcaattatttgcatttgcctacttttttcaattttctgggcacgccagatgtttgatgaattgctcgaatagatagatgtcaaagtgaagcgaggagacccgccgattcgacatgtacgggagaaaagggtatcagcttatcaaagattttgccaccggagagaagggtcagctcaaacctttcaacgtaagacttcaagctcccacctttatgacactaaatctctcaatttatacaggctattgaaatttttgagtatctgtaatctaacgtatatcaatcttgcaagtttggccagtaggttttgattataggtgacggaatgttagcaaatttccagtcctgggttgataatatccaattctgtaattagaaagtattatcttggttagctatgaggtagattagttctttaacctcttgtatttctaacagagcaaactctttgatgaaacaatcgaagagtgtgaccagaatcaccatcttatccagtccttgataaggtattgatccccttttttacactgttgcattttttcaatccatcacaaaagacttacttctgattcattgaggttgatgtttccatttacaggaaaatgcaacaagaaggtttggatgttcagaacaacagaaacgctgaccactatggagcactaattcaccaccttgctttgatccggaacaagcgctgcctcatggcttatgtgtgagaaccacgtttcctatcagtaacactatatctggacactcaatttcttaaaaatagctgcaattggtgtcgctatgcaggtacaaccgagcagaaattgtgcgtgatttggcatggagagtagggcttgaacttctcgaccttccctctgaaatccaagagaagctcactacactagagaaggaatacttcaaaaaccattcggttgctctaaaatcatacatgggaaaagtaggaatcgagttgaatgtcgtaagtcctctttccaccaccctggcttttattaattaattggatttttcttgtttggtggacttgtaactagtaatctcctcttgatccatttcttgaaggatatggtccctcctaaagatccttatatcaaggtcagaattttggatgatattgatgaaggaatcgtgctgagtgacaaaacaacaaattttgcccgtcattctatgcatttcctcaaacgtactgatgcggaaccatacattgctcgggtcagtctttttcgttattccttccctaaaactagaatgatctaaagcccataaacttccacgaactgagaaattcaaagaatgagccttgctcaaattcgcagagatgtagatagaaccttgattacagccttccctagcaggtttaataggaaaaaagaagactgcttaagatagattataactgaaaaaacgaaactatagaattcctgaaagatctgaatagtgatgcaaatagaagttttaggtttagaatatgcgtgaagtgtaatctgaagaattgacttttgtcacatttcttggtaccgtcaagattacataaggtcgaaacatttcataaactgtgagtgtattggattctttggttttccatgtgatgtttgtcatagtatgccaaaggagttgctaagcaaatgcagtctgattctactgcctagcttaaaaggggtctcgtgtcccatcatttggataaagagtttctaattgttgagatgtgaatgggataacagggccaaatggaggagctgacaggatgattgatctaatcagaagctgtggtgggctcagatgaatcacggtcgggtctgtgatcaaagaatgtaagcttacttagccttgtataattgtaagacaggaacatgaaaccagaaacctcatactcaaactcatgtaacaattatttatcttacaaagttacttctgtagtgcataacattcactagcaataatgcagttttgacaagctcaaaattaccttttttccaatggacaatctttcaaggcttcaatactcagtctttttgttacttgctggcttttcactatagaagtgaacctgcagctaaaaagataagaatctgccacaaatgctgcagaaaaatgagaatatgtcatctacaaaacatacctcaagattagcttgtaagatctgaatagtgatgaggcatttactcgaacgatgatcattgtcacatctctgattaatgtaaacgataaacggatttttgatgtttccatatagtttgatattgtctctttccttaggcgttttcaaaaccataaacataggtgaatgttatttacaatgtctctatagttatgattaatttgagttgctactcatcttgtttctgaaaggaggaattcttgcatcttttgaggattagttttttgacttgcatacagaaaatgtgttcttagtctcttgccttcttagttgttaccaccactgcttcgtcaatattttattattggattcacaacaaaaaaattcctctttattttttatgagaaaaggggaaaaaacacttaaaaccttttgtgttgaccagaaaaaaaaagagggataaaacgtgggggtattaatgggaatggggatgttccacatatttctgaaatttttttccctctgctacgaaacctttgaaatttgtgtcatcgaaatcgaaaccaaaatggatctttcgaagaagaaatgggcttcgattatctccgtcatcgcttcttctctgttttcgctcctcatcgtcttccagattcctctgttcaggtatcatcatttccaaaccattcatcgcaattttgtcatctgatgaacgcagaaaccaatgcactaactagttgaaattgatggcaaaattcaccaaattagggttactctgttcaacaatgcaggggcgttattggatttagatgatcgtaaaaagacagatagcattctattagggattgaagaaatgtatgtcttagaccattccttgttagagaacaatctatatttgaattgagtgcgctttgtttgtttatatgttgcagagtggcgtgcaggaacaagagttgtgaaactccattagaggtcatatcctctgagttgattgctactgatttgattccttcttctcttgtcaagaccctcctttatcctggtgccattaccaagtctctttttgctggctccaaaatccccagctaccaccacttgtttcagttttacagtttcgacggcatgtatcgcacctcctcctttgcaaccgatattcatcatctagaggttttgcttcttccattctctccatccatctggttataacaacacctttagtccaacaatgtcaatccaaaatctgcttcaggtgtttgctgggagttgtttgtgtcttcttggagctttactcaacctgttcaaacccacaagaataaccttcattggaacgcttttgatatcttggggtcttatcagagacattcttcttctggactctgctcacgattggataagcccccacagaaactctgttcgtgtctacccaacactgtttctagcttcactttctgcatttctctccatgcgaagcgacgtcaggaagatcatcaggtgttgtacatctatcaccctttccaaatcctctaaaggagactaggcttctgcttcactaacttcatagattccaacacctagaagaactcacttttcctttaaacaacagagaaactgttattttctgagaaaaagcttctgtaactttcccatcaattttcatcatgaatatgcaatcaaggttcactttttcttttccacctcatatccattatgaatttgatatattacagatctcttggaaaaggttaatcttccatgaaaatgaaaaaaccccaataatgctacagatgagtaaactaagaacagatgtctgcctatgatacagttgtaagaaaacaaatatccaaatagaaacatacacaaagaggaaggcatgtgcctttagtcacagatctttctacgatcgtcttctgcttcggctgccagaaccgtgaaccagacgagatgctcccccgcttgtctctgctcctttcagtttctgtgcttccaaaacttcagcttcatccatcagcattgctaactgcacaacacacacaacaggatttcgacccagccaaaaaaatcatcatccatgaaagagctttatttatgaggagacacatacccggatcttgttctccttcagcctatcttgaagtgcgttaatggcaggactcaagctgcaaaaagcttgaagttcatataaccaatgacaaaacaacgtatcaaatgttaacacgcactactaaccagtattctattaacttgcacatggaagcctgatatgttgatgtgttgtgaatgaaagcaagaggatgaactctcccgtctctagagaaacaaaaggagcttttgcacttaaatctctatgattaaggtatgaagaacatgtaacaaaaagattaaatcgaaaacctcttgctttgctgcacggattggtggtacgctgctcgttcctcctcgtagagtactcgttgcaggcttttaaaagatgctaaaggtgaattgagttgaagaagggatgaagtcggcaaaacatgaagtgggacttcttttctaacataccccacaccactgcacgtaaaatccttagcttaagtaataaaggaaataaacggtgcaatgttcgtaagcccaaaagttcatgttgagaaatacctggtttctaaatttgagcggtgcattgcctcttgcatactttcagacatgtccatcgagtcaatttctattgctgtgctgctgtagtttccacttgttccatctcttctggtgttgttggcctcagtattgttcacaaagaaagcctcaaaatctgaaacgcgtcctccaccctactcaggcacacacacatacaaggctcagacatcaatgtgtatatacatatcagccaacggttcagtcagaaatgccatcattgtcttaagaattcgaaaaatgagttgtattatgcacgaattgtaatttgacaactttgaactaagctcgagtaaaatgctatagcttttggaaaaagagaccttagatccggaagttgtagctgtatcacttgtgtcgagctcaggattgtctccccgagcagaagacgatctctggtatatcgagtccgaagaactaaatgaagattctaaatcgataacagaatctttatttgcaagaaccaggctcattgatttaggaatactattcggctttccatcagaagactggaaagcgataacttggattctgccaacctggaaacatcaactaagcaaattcagcaatatgtataagctgaagagaagtatttttgaaaagtttcaagtagctaatccactcatagcaaatactaactaaccttgttagcatcttcactaaaacaggaaaagatgaggccaataaaaccagaatctaaaagctgatacatagcttgtgttcgaacatctgcaggcagaaacaggacataaatatgaggaacaagataaaaacatcgagaagttacaatgatgatgatacataccgacatgggaaggaagaacggtaatatgaggatgggagtggtaccatccaatgacccgtgtagttctgcccgttgatatcgtcattctgtgtcgaaattagtgaaggaagactacaaaacactcttgttttaaccaaaccataactaaaatacacatagaccatcaatctgaaaaaagcaagtttataaaaaggatatatcagcctgagcagaagcagcagccagttgttcaggattggtttcaactctatccttctgccgatcagaccgtgactgaggcgatgctccccagatcatagctgtggcacttcccccgtcctttgagtactaagtcagtttccaaaaccacaacgaagagttaacataaacacaacaagatttgaaactcaggattgtctaggaattgttcaagccttgtataccatcaaaaacagagattacagagaggcaaaagccaaactctttctttggactgaattgagatcaattcaggtaactaaaaatctgaggcaatatcgaatctaagaaagatgaattattcgctgcagagtaataactagacggagaaattccgaattacctcgatgtcgccgagaaggagacccatgatctcttcggtctcggtggataatgcgtgagtgaggcaagtcaaccagacatcctcggacatattaacgcatgtaagagacataacttcttcggaagagataaactttaaacctttatgcagacgttatttgcttcttcgagaattcgatttgattttgcctctttttagatttatccgacgaaactggagaacgaagaagaaacaatcgtacattaataataatgtgttgcaacttataatttagcagagttctgatggcgcttatatgatacgtacggtgtacggtgttctccattcactcctcaaatccggaccgtacatattctaagtcctttgacctttaatcattcttgctttgtactttgttattttctttacttttttttttttttctcataaaaaccaataacaaatcaaaggcctcgtaatgggcttttcagttgtttgtttttttattcttttctacttatatttttcatatttttttacctactgtatgtttcttttagttataatacattatcatatttttcatttaccactgttgactgttgtactatataaaattaagtgagataaaatgtatgtatcaaactgggactagtgtcatatattttaagtaaggccaacaaaatctatttatatgtaactatctaaaataattttgtgtttttagtaattaattatctttattttgactagtagcggcgccggtttatttaatttatattaagtaaaatctatgtgttttaaatcttttagttatatgctatcttaattttgataagtgtcactatctacatttaaactaagtaagatatatgtatttgtgtgatttattatctaataacaccacatcaactaaatttaaatgaaatctatgtgtctttagaaattttgttattattgactagtggcggtgctatcctatcttacaataaactaaatgtatttttagttttaatagtatatttaagtaaaaaacataatcatttgtctttagtaatttattatttatagtttgacaagtggcggcggtatacatctaactttaaattaagtaaaatctacatgtgtataataattagttatctaaattaaatcaaaatatgtgtatttagtaatttattatctaataaaattgattggtgtcggcgccgtattatccgaattaattaaagtaatgtgactagtaaaacaagatgaaatattagttttagatttacttctttaattcattaaaattaattaaaaaggctatttgtcttatttctttatttcttaaaatatctatctagtttgtataaaatggtttcttataggttttagattatttatttttaacttttaagctttagacacaaaaggttgtgatttatttacttttgtatttcattgaattgtttttcctttttaaatttcaatctctttactaaagaaaaagaactcaatctttcaagaatgccaaattatgtttccttagttaaggaaaatcgaaaaagtgaatacaaaagaaaggggtattttgccattttggtcgaatgagataccacgagtagcttataaaaagccatagaattcacacaaatatgcactcaacatcaaatcttcaatcttgagaccaaattccatcgtttgcatacttatttaaaatttaagtattgatctagctagccaagttaggtgcacaaaatcgagccaagctaaggtatatattttctccaatattatgttcggtcgttggttggattttttttctcagtttctcatatcaacttcatattaatctcattgatctgttaaaattttagagcgtttcttctaaagagtagccaaaaactttgctatacataaagacctaaaaatcttgcgattttggcaataactttcgttctcatgtattgaaggaaaaatattttaaaccatgatttagtgatcagatgcacactagagatacctcgtgatctagttttgtccatttctttcaattatatgcatcgggccttctcgatgatgatgattgggtcaacatgttaatcgtttatagcgctttgtaggtttgattagaaatatatggttatcggttactctatatatacacgattcaacgaatagtaatcgtttgtggtatgatctttgagtctgaataaaatatttgattccactaatctcgtcaatgaaatgataaagggatagtttaattatggtttcatgatcatggttttatgaaatttgtttctaacttatatattgatgtcattagtcaattttcaaatcatttagcaggaaagatgtgtaaggaaagacgtatagtgtgtgagtcaagcaacaagatcagagtatcgccatacccgcttcgatctactaggaccaacaaactcaaagcaattgagtcacctattgatgagtcaaattgggaagatgtgcggtgtatgatctgcatggaaccgccacacgaagctgtgcttttgacatgctcgtcctcactcaatggatgtcgtccttacatgtgcggcacgagttttcgtcactccaactgtttcaaacagttttgcagaaacaacagaaaaaagcgctcaaacaccaagaccttacattgccctctttgtagaggagaagtcttggagacgaaaaaggcttcgaagactgcaagaagattcatgaatgctaaaccgaggtcttgccctgtggatggctgtgaattttcagggacatatgctcaccttaataagcacttgaaaactgagcatcagggtcttgtcccagcaaaggtcgatccacaaaggcaaagtaggtgggaaatgttggtaagacatgctgaatatgttaatctcatgtctgcagctgggattccgcatatgtctggggttgtgcatcatcaacttcccaacaatcatcatcttccgatgtttcaggtgggctttagtggaaccatgcaaaatttggatggtccgagtaatgtaagtaacggatttggtcccgtcaactaccccccagtttttgtacccagactgcagtttcgaccagtgtttgacatgtatcgtgataggattccatgaaaaatcctagttcattgataaccataatcataatatttttccttttgtcagtttggatatataatgtttaaaattcagcattaggatttgttatctttaaaattcagtatgtttgttgtatatatagcaacttatcgaatcgtatcctccaaagctttatttaatgataccttgacttattgttttatagaaaaactattatagaaaatacaccaactagttgatatacatcattcctatatcttaggtcaaattattaaaatacatatatatatatatatatatatatatattatgaatctaagttgatcttagaaaattttaagaattttgtagatttttcataagagttttataggttttttagaaaaaagattaagaaattttgaagaaataaaataattttagtttgtcctcagattttcatattactttcgccaagagtagttaaacatatatgtttaaaatttatgtattgtaatagaagacaaaattaatatgtatattacttttggatatgtaaaattttcatttattttttaacatcttagggcttgactggtatgttaagattaccaactgaattataaaataacgaaactactttgtgatagatgattttttttttttcaaaatttatttatattttaaaacgttcaggataaatttttaaaaatcacattgttttttttacattttgtaattcagcacaaacttttgacatgaaaaaacagtataacattcaagcccttaatgaaaatttgaaatagctagaccgttttttttgtttgatactgtacatggaattttcagttttattaatatgctaatccattcctaatttcagtgaagcaagccaacatacataaaattaattccctttttaattgtcacctttaaagaattttctttttcgttaaaacaatttttgaaaatcacgtataaacacatgagcacaaggagaaagaacaaaggtagcatctcaattatttggcaaaaaatggcgacgagagcctgaagatggaccatctattttcggcggtttaaggcaatcactgaagcaattggtagagaactgagggtagaattaaaaccaaaaaaaaaaaacaagacgaggctgcttcacatttagcagaagccacactatttcttattacaatagattgttttccttggatcagtgatggtcatcaccatgtccgtcaggaggtcctccagggccgaccacttcaagctacgtattaccaaatcgttttgcgttaatcagttgatcaatgcctaacgtacaatatccatggaaaatcaaatctagtatgcttttatggctaaccttgaagtactgtgtacacacagggcattcaaaagacttgcctttctccagccaaaaccagacaacatcatgctcatcctctgtagagaatgaaaaaccatcatatctcctttggtctactaaaaataaaccaaatcatgatgcacacaatgaaagcaaaataaaaaagacccacctccttcacctccagggcaaccaactattctcatgtcgtagtaggatttgactacagcaggagcttcctatagatcagaaaacataacactcagacaagagtcgagagaggtttgcttatcatatacaatatagtctatccttttcaattacacaaacctttgttccaaaaggcccttcaggaaagtctatatcgtccagcttcctcccctgtcaaaggtaaactaatagcaatcagaaacaaatcaattgctctctgaaatgatatagccaaaaggtaatcaatatactcctatatattatatcttcaaccacacgctctaaagcaacaaactaatgttgtttaggtactaatctctctaatcatgtcaataactcaagaatcaatcacttcacaatcattcgtgtaaaccaaatccaattaacaagtaaggattagggagaaaagaacctccaattcggcttgtagttcctctttctcgtgaccggttgcaataggcatcacatcttcaacacgcttcttcacagcagtatccgctggaacaaacacaaatcaaccccatcgtcatatttttgtttaaaactacagaaccaggttacacaattccaaaacgtagtagtatcgtatatgtcaaatccagagaccaaacccattcaaaatcaaagacaagcacacaataaatcatcaaatagcaatctggatctgtaaattacctgcagcggagccgattaaacgagagaatatggaggaatatgcgggaatggaggatgcacgagtcgagagagaaaggtgagtggactctacgacggcgtgcctgcacgacggagccgcgcaggacccgacggcggagatggatttaagatgcgatgaaacgattctcctccacataatggtctcgattcttcgggaaaattaggtttgtcgtttccgatctcagatgattctcagtctccgactacctccttcaaacggaaatgaattgaataaattgaagattgaacaagacttcgactttttggcgacggcctgttgggcctggatcatgcgacttgttgacccattatctaatttgaaacaaaaatcaaaatcaatatgtaacaagattaaagtaaaaacttctgtcgatgattaaataaatttttgtaggatatatattttcttaaaaattaattaacgcatatgatctaatactatctcttattagattttattggctcgtaaagttgagttaagacttctcagaagaaaaaatgaaactccgttatatataatatatgttgaaacggtgattaactagttaataaattttgtgggactagttcgtaaattacatttttattatgtaacatgaattacaattatccattaatgtagtatattcaaccgaatgagtcaacgaccccaactttcatcctcggagtttcccaaccgctaccagcctaacatcatcgatcaccggaccacatagcgagccagagtgatcgcttttcatgtggtaaaacgtgctcaagaaagtgacacgtgtcctggccgacactgccttgaacacaagcctcccacgtctaaacccgccttttcctttagaagcgtagtccaccatgaccttgccctgtccagcgaacgcttccacaatcattggtccctcacaaccgtctctggcgtctcccacgttgaacgtgagggcgtagaatttgttcagtgacgtcctcactatctgagaaatggcgctctctttgcctccaacaagctcgatggctcggtgtccttcggggacagcgaagtgtgctttgtctacgtacttaacggctttgagagactcgatcatccaaccgggcaatgggctgttatcgtcctcgatgaacggtgggatcagtactccccattttgccgtgggaaacacgtaaggtccttcttcgaaattcccattctttatcagattatctgcaaacagaggtcaccacttaatcaccgaatccggtttactctaaaagattaaaagatatgaatatggtcggttccggtttacttacatccagagaatctgggagggaacaaagccttgatagccacggcgtcgatcaaaggtccgcaagccgggtgctcttcaacaccagggttatggaaccggatctcgatttcgggaccaccagctttaaaagcccatgagtatgagtcccaaccatcgctgccgtacatcgtctggatagggatcacacctgactcatgcgtcacggatatattgagcctctcgtcttgagcgcaggttcgagcggcgctgaacgttattgagtacagacggccaggtaggacggatattttctgggagattgaggcttcgttgcctagtctaacggcggaggaaccctgcggtacgaccaagaccatgtcatcttgtttctgaccggatttaatgaactccacaaagccgattatgttccagtttggtacggcggttcgttccttaaccacggatcctttcatttgggagggtttaggacccaactcgaagttgccgtttggtaataaacctgaaacaaaaaatattaagaaatgttaatttataatctcggatttgagttgaaatgagctttaactagagttactaccatcgcggactggggccgataagacgacattcgaagagatgaagaggagagctaagaggagtgctgcttcttggtacatcatgacttccttgggtgatagatgaagatcagatggtgagtactatccaaagggtgaagaaaggctgggtttttatgagtttgagaatagaagacgagcactggttttgaagaaaacaacgggaatgccactggaagcatcctgggttctattgtcaggtgccacgcagacacagacagctagctcaggaaacatttgacttcatgattagcatttccatttcttcaatgtattgtttaaggggctgccttaacaaccattatattaaactatatattcaaacgtaatttgcgtttgcctatctaaattattcacataaattttcaaagtattaaaatattttttggctttttcagaaaaacatttttgaagatcagtacatccatgcgtaaacgccaaaaaagttctttttgaaaaaaggtttacgggtaagtattccttaaaaagtgattaatctggaaaaaacatacacactaattaatataaatatatagggtacgtaacaactaatgcaaacaaacaacggaaaactaaaatatgtagagaaaaaaacatatatatcatcaccactcaactataatgccatggttttggaaaatgaaagaaatataatgtatatttgagatgtctctaagattagtcatttaacgccatgcaactcatcccaactctaatcaataaaaaataattatgattttcgtatagaatgcgacaaccaaaagttaatgacgggggaaaatatgtgctgttttggaataaatcaactcaacttaaaaatgaagtcaaaaatggtattgattgatgttagatattgatcacattgggatgaacacgtgcaggggtaggttgttttctggtgcagggcacgactgccgactttaccgcattagaagtttcgatcaatattcctaatgtccttattaacatgtcaaccattatcataatccaaactcttcccaacatctttgattaaattatgtatacattagttttaagtttcaatttgttaggcaaagtagagagggacattatggtgaaaaaaaagacaagggacattaagaaactttagttatacgtcaacatatatataaaagacaatggttgggagagagatcacgtgcgacaaggctggaaagattgatttgccgtaatttcaaagcgaaggatttaaaaaaagatgagtcagaaaaaaaagatgaggatatagttcgggggtttgaacccgacgtgaatcgaacacgcaaccttctgatctggagtcagacgcgctaccattgcgccacggatcctcaggtaattacatctatacgtttacttatttatactaacaattagtgaatgataaaaaattaaaaaccccttccgattctaatttcctggcggagcaaatttagggtttatcgtttgcatcggtctcgcgtctcgtttcccacagacacatctctcgaatcttttgaaggccttcattgcaatagattgctcgtaagggataggtaggcctttatgttctgccgcttaatttcttcgccggattctgtttgattcattttaaggtgagtgaccccatcgcttttagattacagacaagtatgtatttatggtttgaatgatgcttattgtcttgttgttagcttagattttacattcagccattaatttagtattaataagcttcggttctacttgttttaagcagttaaatgctttaatctctgaatctttgaaacttgctcctctcttaggaattaggatggaggaattaacccaaatcttgaagaacaataggacagatgatctcacttggttttgctctctctctgaatctgaactggtaaattctgcttcttccgtcagtcaagcaaacattaatcgatcgatgaattaccgagatatccgctgaacttgttttgcaggatttgctcatcagcttaaagaagctagccattcaacgcgccaaaataagtggtcaccaagaactagctgacaaatttgatcttaagttgctccgatctctcggttctcttcttgcttccttagacttttcaaaatgttgcacaatcatgaaaattcttctatgattagacatcagggttgctttgtgaagctttccatctttgaccttatgaatccagtatgttattctgcagggcttgtgctaatggagcacgcgaggaaaagggtacaaaatgatacttctcttgctccgagtgttgttcatcaactcaggcttttggataactgcaatttgttgaaaacgcatgtagatgatgctgtagacattgaggagattctgactcaaatctgcgacaacaaatcaaaaaagaaagcacggaaaaggttggtatacagttagcggaaggaccttagagtatttgatgctagatatttatgctttccttttgtgtttgaaggaggcggtagaagctacctgttgcggtggggaagtccggctgcttaacgacggacagtgagaggaagaaatcaggatgctcatcagcaggagcacaagaagatggagttggcggagaatgcagagcatggtcttgaatcttgatcctcatattctctggtgtttggtcattctttctgatgaacggtggttggttgcaaatgtttgtaattgaggatggtgtccttaatacgtagagtatatagcaaaattagcttactttgtggtctctggacaaaattttgaaaagttgtattattgtatggttcatatttaattaaagttacggtttcttcatttgattggtgaagttgcgttgtttgaagaccaaacgagtataccgcttccttcgtcatctctgacattggtggtacttgaaaatgcaactatggtaaaaatttcttagggtgatcataaactattctaaaagcatggggtcatatcatgaatagtactgattataaatccttaaagtgcaaaaatagtcaaggaagaaagtacttttacaaaagggtaattccgggtaaatgcaattgatcggcgacgcattctcctctcacagtctctctcagtcactggctctcaaattcatactacttggcaagcttgctcgatttccctcgtacagccaaattgtgctatgggaatcaaaattaacagtcgcagaagccagtaataatggagtcgttgcttcgagctgatcaaaccctaattccgggagcgatgtgtagccgcagagtttggacacactcagaactggctcttccctcagtgagcgtaactgaattggatctggtaagcccacacaattctctcaatcttttcttttgacttgttcagtttctatgtatcctcaatttcttcgttgaataggtgagaggtctattacaagctttgcaaggtctgtctagtcccttccttttctgggaccaaactggacaaactttccgcgccaaaagtcatatacgcgtctctcatttgtctcactcaagccttcatgttcttctcgctgggttcctgtatcccgctacatgtttgaaactcgttgagtctatcgttgctgccattaatacctctcttaggtctcctcctaccttaatggcattctctgactctgtctccgcatggcttgaggcaagtttcctcaactttcttttcattttgtttcttttaacatatgttgttttgctttagactaatttacatttggcattggatcagagactcagagatattgctttgaaagaggaagtgatgatcgacaattctgatattactgttactccaaccctcttgggattaaccagttctttatctaggtgtgtagcctatactcttttttcatatatcaaatgctaaactctgtgttcatgtttttatttaacggtattcttcttcttttctttccatgtacaagtctttgttcaggtgctgaatatctcttacaagttgtacatggtgccatccctcatacgttttttgattcaaactctacgatttccgctgctgagattgctgtccatgttcttgattatctttacaagaagcttgatgaagtatgccttgtacaaggtggtgaggttgtgaccgtgttcatgactttctgtgtttttctttttaatctttgttggtggttactttcgtaattgaattagcgataaatatttggaccaggtggaaggatttcacatgctgttgcaaatgtttgctggaagtttattgccatatatagagggtttggattcatggttgtttgagggaactcttgatgatccttgtgaagaggttagtgttacattgatgttcaacgcttttctttctagcaatttctgcttcaatatagagtattttgtattatggctagcaaattgaaggtttgatctttggtacttcgcagttgttttttacagccaaccaatcggtctccgttgacgatgcagagttttgggagaaaagctatcagttgatgaaggtgcccaactcaaaatcaaatgtaacttcactaaacgaaaagaaagtaatgagtggacatgacgccaactcatctttagcttctgacaaagacaaagagcaaaatactcgggtgttatgtcccttattcattaaagacatctgtaagtctattgtttctgctggaaagtcactgcagctaatgcagcatattccttccacgtcttcagaaaattctggaaagactcagttccatgggcgaaatggttatgggaaatctagcgttggtagtctcctgactaaaatgagcagctgtagtagcactgcggacttatccttgtctgaagtcttttgtttgacactcgccggccttataggccatggtgatcatgtctctagatatctgtggaaagatgaggcggatgagtgggagatttctccaactttagcatcatatataagtggagagcttgtgaatgacatggataataaagatcttccagttctcacatgctcagagcgaatgtggtataagttgttggtcggtgctgtgcaagagaaaagagctatggaggccaaatcagaactccagagtgcatgctatgctacaggtgttaaggatggaaatagtggtctcactgcccaaaaggcgttgcaggggttattctgtaatgaaaaccttgttgtttcagtatctaaaatggatcttgagaggaatagaaatgcttggaatgtcttgaacttgtcgcaaaactattgtctaccctctcttaatgatgagagtctgttgagtgctgtttttgaagaatctggcatggcagatgctggactgagtggaacaaactacaaatttggattccaatttggtagatctgaatatatttcttctcaggatgacacaaaccttctagaaacattatttccctttcccactttgcttccgtcattccaggtactttgatactgatgatttatgattattttatggcacttttcttcgattttctctcatttgcaatagtttctgtttgcttatcttgaaatctttgtgatcaacaaaaaagccgaagctccatctgtcagaattcttacctttccaaaagaatagtacacttccttcaagagttctcagctggttgctaaaggcagagccaatggatactcgacttcccgttgtaattatgcaggaatgcttcacaatttacataaggaggcaggtagggtgatgtaatcttcaacattgctgcttgtgcctatggcatgcatactcttgttaccttctgaaagttgtgtatgttttaggtggactacattggcaaagtgattttgtcaaaactaatgaatgactggaaattgatgcacgaacttgctgtattgcgcgccatttacttgctaggttcaggtgcgttttatgtgctcaactgttttggcaatatggttgtatctgaaatcttaataaccccttaaaactttcaggggacctgctgcagcattttctgactgtcattttcgataggctgggcaagggagagtcatcaaatgatgattttgagttgaacataatacttcaggtaaccaggtttggtgtatttttaagagacactgctctcatctttatagttgttatcacttctaaaatgattccgcttgttaattgtttgcttatgtatccgtgttctgttgccgtatatgtgttcatacaccaaacttatttctaaagtgtaatggtcttctacaggaatcaattagaaattcagctgatgccatgctgttaagcagtcctgattcattggtggtatctatttccagagaagacagagacaaagatgataagggtgacataatacccctttcttcaactcgtaaaagccgcgttaacagctttggaatagattgtctcgagtctctcaaattcacatacaaggtctagagaaacaacttagtcttccatccaatccgtactggtatatctcataggccacatctatgtgtatttgaagagctgaactgttttcttttttaaggtgccatggccacttgagcttattgccaatagtgaggccattaagaagtataaccaggtaaccctttctcatccagctatttttgtggtaaacagtttgttgttcctctatgtggtaattatttaattgaaaacaggtgatgggatttttgttgaaggtcaagcgagcaaaatatgtgcttgataaagcacgaaggtggatgtggaaggtctttgatatctctcaaactcatttctttcttcttagactgtatcccgtgacttccaaatccagtttgaaagagcctaatcagtcttttgatctatacatataaatataaagggaatcataagaatgtggttcagtttgataaacttgatgactttggtgtttgtgtatgatagggtaaaggctctgcaacaaaaatccgcaagcaccactggttactagaacaaaagctcctcaactttgtggatgcttttcatcaatacgtaatggacagggtattgtccaatgctaaatgattggttataattacagtatcatttttcgttggagtaatataagtttgtgctagagttgtggcaaaatcgaaagctgatcacatggcttgagtaagatgaaaagcttgccatgcttaactgtattttgtaagcaggtatatcacactgcgtggcgtgaactgtgtgaagcgatggtaaaagcagggtctctggatgaggtcatatatgtacatgaaacctacttgttatcgattcagcggcaatgctttgtggttcaagaaaagctggtaatggaccatgaaggcattaagcgacctcttaaaatgcatagtatatatttgaagttgtaggcttctaaaaacctagtgtttggtggtttttgtatagtgggcaatcatcgcaagtcggatcaacatgattctcggtttagctctagaattc

SEQ ID NO: 146 - DNA, 109694 bp, Arabidopsis thaliana
gaattctaagtaattgtaagatcttattactcttgtaaaaaaggaaaaaacaagaatatctcaaaaatataaaaaaagaagaagccacatccactgctaacaaaagaaacaattttctttttgcagcattctctaattatggaagtggttatttattcaatactcttgtggggttctaaaactaaactgagaaacacttgtttctgaaatcacagggtatagtgttgctggatagcctcaatgtctagtcccttctgcttcactactgattccacgtgacctttcaaggtgtgacgttcccttaacctgaaatttacaagacaagaaatgtttgtaagcccattttctgaggaacctaatggtatggaataatcagttacttgagcgttgccttgcaacttcagctcgtctcttggcttgatcagctatctctgaaagctctctgtaagtgctcttgtcattgaacatatctgaggtttgagctggctgcaatccgtgaagtgtacgttgcgcttgtgcccattgtgcttctctctctccctttccgtagtctttctttgacgtgaaagcggtctgaacagaggaacaaaggttaggaaaaaggattatactactgtgttcttgttctcatcagtattggcctgagaagcaaaccttgttctcaatgacattatcccatgctcttccactcagtgaatatctgatgatgaacttgaggatatccaatgggatgtagaagactatactatagagccagataactcctgcccatccccacccaatacctctgattcttgcaaaattccagtttgcgtataccgcaatcaaagtagcaatcttggaatgaaaacaacaacagtgtcagtatatactgaagcttcttatgtaagagtactgaatctttaacttaccagctgagccatgaaaaaggcagagatcaaccagaagccaggacgttcaacatatgaccagcttcgcgaccttgttacaaagataagcgcttggctcacgatactaacttgtaggtaaacagctgctgttagctcatgcggatttccactgatagatctcaccccaaactttgcctgcaccaagagaaaactgaagatcaacacatacacttactcgagctggtcataaaagtaagatagaactctcttacagagaagaagtcagtgctctctgcagcccagaagaaaactacagtcatgactgctaggtaagtgccaagaacaacgccggtggcaaatatctctttgagtttccatgaatcaggaagtggagaaggctttactctgtcctttgatatcgtcatgatagtaccatcattcaggatagcaacgatcaagaccatgaatggtgagaagtcaaacttccatatgagtgcaagaagcataaatcccatcactatacggattgtgattgaaactgcatagattgtgtagttcttcattctctggaagatggctctgctcgttaggacagcactaactatgacactaagccctggctcggttagtacaatgtcagatgcacttcttgctgcatcagtcgcatcagcaacagctattccaatgtcagctctcttgagagctggggcatcgttcactccatcaccagtcatgccacaaatatgcttcatctcttgaagcctcttcacaatctcatacttgtgttctaatcagacagatgaaacagagttaaatttatggagttgaaccacttgtgaaggtagaagatttgattgtttttaccagggaagacgccggcgaaaccatctgccttctctatgagttcatcaacaggaaggctagctatagattcatccttatcttgtccaagtagagcagaagatggatacatgtttgtgcccatcccaagcctacgaccagtttccttaccaatggcaagttggtcaccagtgatcatcttgacattaacaccaagatcaagggcacgcctgattgtctctgcactgtcatgtcttggagggtcaaagagaggtaacagaccaagaaactgccatggttctccagggctgttcttgtctttctcagagacagtctgaaattcaaaaaataggaaaaagagcattgataaaagagaaagaaacacaaatgaatcccaaagttttgggactggcactaaatattatacctgtctgccaacagcaagagaacgaagtcctctgtcagcaaacttgtcaatgatgtcatgagctctcttgcttgcatcctcccgaaggttacagagctcaatgatctaagaattacagagaataatcagtgggaaagaatttgaaaactcttgagagaagaaggaaatgaattttgtattacttgctctggcgcgcctttgctgacacggtgccagtttccattagcatcgatgtaagtgatagcagtgcgcttatccacagggttaaaaggaaagaaatgaacttcagtgatgccttctcttgcttctctgggatctccaagcattcctacaatgcaagcatcaatagcatcttggttttcaactctagaggctcttgctgcattcacaagaagctgatccttgtccaagtctttgacaaaaacctcaaccatgctcttgtcaacagtaagcttgttgagtgtaagagttccagtcttgtcactgcacaaaacatccattccagccatttcttcaattgctgtcattctctttgtgatagctccttgttgggagagacggtgagatccgatggccatggtgacagacaaaacagtgggcatagcaatcgggattcctccaatgagaagcaccagaaggttgtcgattccgtctctatacgctcgtttctgaataggatacatcacaacgatctcgatgagcatacctatagcgatggaacagatgcagaagttaccaatagcagtcaaaactttctggaaatggccttcttggtttgtgctatcaacaagatgagcagctttgccgaagaaagtgtgaacaccggtagcgatgacaacagcttctagctctccttgtttgcaggtggagcctgagtaaacttcttggcccgggtgcttggttactggtaaagactcaccagtgagagcagattgatcaatcttgagaggatcaccatccaagagacgaccatctgctggaacaatgtcacccaacttgatgctgataatgtctccaggcaccaatatagctgcctcttgctcgctccacttgccatctctcagaaccttttcaattattattagtcatgaatcatccacatgtttgcttgtacattgaataattgtaaaacttactttggttttgggtgctagaccggccatcaaagcggcagcagcatttccggcgttgttttcttcaatgaagcttatggtagagttgatgataagaagaaccgtaataccgacgaaatcttgccaatccggtggccttccctgcagagtatacaaatgtgagaaagatggatccggaaaaagaaagagaggaagttagttagtttactcctccgttggccaaggcgatagccataatagcagcgagctccatgacccatgagagagggttccacataaaccctaagaacttcaaaaccttgttttcctgtgggatgattcaaattggttttagatggagtttcttgagagtgaagaaacaaaaagagaaagatatttaaggatgtgtgcctttttctcttcgagcttgttaggaccgaagatctcgaggcgagtttggccttcgtcgctggtaagtccttcccttgtacatcggagctgtgtaagaacctcctcgatcggtattttctcctgttttcaaaaccaagaatgagcagctaactcaaaagtaaaagaggggaatattaatggagaaggatacttacgagatcgatgccttcgtttttgatatcgtcccagctagaatctttattccccgccatcttgttttacagaaacagggtggtgtgtttctttgttttctttttcactctttctttctttctttctttctttgttgacaaaatttttccaaagtatctctctctgcacttttttctttttcaaagtgaaattttctcacgatctttttttcttttctgttgttattctaacgaaacagaagaacaaaagggagaaaaacagaaacacaaaaaacgaaaacaaattattttttatataaaattgaaggaaaattggagtcgaagacaaagtgtttatataggtgaagaggaagaagaagaggacgcgagtttcttggctatggacaaagtccaggtcctttgctcattcccgctttcttctcctgcttccactaatctactgccacgttatctctctctctttcttcactaactaactaatgaccatatttaatcacacaaccaaaaaaaaaattaactaataaccaaatttaggaaaatttgctccgacagtaacaatgagagaagaaaacattagtcgttttaattatactagttttagataaacatttcttggttgattttattgatttgagttattaaaataactaaagtttaactatggaatcagatgtactaaaataaattcttgataagaaaaaaagatttccttagtatgatgaaacgaaagaggtatgagacgagatggttccaaattaggcccaactagaaacattagagatttacttttagtcttttagacaagactcctaatgtatattcaaaatgtcatgaactaaagtagataacaaagcccaacgaagtccacaagctaaaaaaaaaaaaaaaatcactagcgaagaaatcagactaagcaacgctcattttctgccggttgctccaactcttggcttggccttaacctcgctttcctgcaatttcatttaaaacaaattccgtccgttagatacagacactaatgtttaggaaacatgatgatattactattgtctgtgacgcgcacacacctgtggcaggtgcaagaaaatgctgctttttgcagtcgccgggttgtgattttctgcacctttgctccagtcatagcaagcctatataataatacatgttagaaagcattcatgtatgctctcaaaggtttttcaacacaatgatggttttagattccaagtaaaagaccatctcgattttgcaacatataacatgagcatgtacaaataaagtgaaaccaaataagatttatatcataccgcatatgcatatatcgatccatcgtggttgaacgagctgcatggaattggctgattgcacctcgacatggcctgtggggacacagaatacaaaactgttagataattacttggttaacaaaataaaaaatcaatgcaggaggaaaataccttgagtctttgtttactatctttgtcccagaaattgaaagcaccatctgacccagcagttgcaaaagtgccatgtaccttaaatccacaacaactcaaacaatcattttcatcgctcaacatatgctgaaggcttcaaagaatacatacgagtataagagtataactatagatagagcttaccgggtggaaattcagagagttgacagaatatatatcatttccatctctgtggcatttgaatgtgaagtttttgctctgttgagaatcatccagatgatgaacaccaacccgcccctcaattgaaccaacctatagagatcattggatctggttaatttttcatattcaacaccattgtgatttagataggatctggagatgtgactagcaaaacaatctcccatataaaattactctattttttgctagaatgacatacataaaatcttctcgagattgcaaataaaaacattgcaatgtctaacctaaaatgtaagcatctaacgaacaagctaattcctgtaaaactgaattaaccaaaacacaacagaacataaataagaagacataccaaaaaaccttgctgatcagggaaggcagtaacacacctcgtctggtacttcagtggggattggattctcttaaactcagtctacagtttacacaagagaaactgttaatctaatggtgaaagcctgttcatctattctttgtaagatagcacatgggctaaattgatcacgaattcccaaaaccatgtgatgctgacagcattgttagcacttagaactctcatgcgcaagttataacatggaacaacaaggaaaaattctaacctgaggattttgcaagttgaagactatcagatttctatcggcagtcccgacaaccatcagaggatgtttcacagacaatgtataacatttgtctggaagctgttgggtatgtacaggattttgctgtcttgtgtcccaatatctggaaggaaaaccaacatacatcattaaattcatggcagcaaataaatgaatcagtcaacattctataatttgctacattcagtcataggaaataatgaacaatcattcttacttcaaagttttatcccaacttccagttgcaaggagattcattcccgggatccaagccatagctgcgataggaccctcatgcatagcaacagttacaggttgaccaccagacaacaagggccacatttttgcttgcttatcacatccaccgctaaagactgtggttccatcatctttccaagcagaacataaaaccttcaacacaagaaaggacgtatatgcatcagattcaaaggcaaaagaaaaaaaaaggtaagataagaagaagaatgacatattaccggctgatcatgtgatattgatgctttaggagcactggctagagaggctccactacgggatatttcccaacacctcacctgcaatagaagaagcaaactcacatgttacaatatatatacaagagttattaggacaaacaaattagattttaagccatggaaaaacaaaggagccaaggaattaaaagaaaacctgattgtcccatgaagtggccacaagtatatcagctcttggactaaaacttaagctcgaaatagaatctgccggtgatggagtaacctgcagacaaatacaaacctttgtgaaatttatactacaaacagaaaggcgaactttaaaagagaaacccaagcaagatacacagcaaccatcaccagtatacgttcacaagaaagtaagcccgtcccaaaagagttcattcagtagttacactagttttgctttccaaatcagtgattagagagactagaaacaaatctcacaacaagttaactaagacaaatctcacaacaagtttctaaatcagtgattattagatagaaagaaagagttaaatcagaaaatagctctcctcgatttcagaagtaaaaccctagcacactaccggcaagattcaaccaagattaaaatcgacgcaaaaacaccaaggattattatataagcgatcccatggattataaacccacaccctaaatctaaatacaaaacctcgagaagcaaatccaacaaaataaatcaaccaccatagaaacagaaaagagttacctcgtaggatttgttagggttactgttggcggtagcaggcgcaccaaaagttgccattatcacgagcgcgaggtctgattaactgttaaaagttcaattcaagagacagaatcacataagtaatccttctctaaaagcttttatcagaataaaagagacaaacctagagagaagaaggtccgtcggagatatagacttttccggtaagcagaagaggagggaaaacgaattgagtcggaagagagagaatgcgacgaagtacttataaaggtctctctgcgtcacattgacgtccggcgcagcgtttatcagacgctgggattaaaacattttcataccgaaaaaaggaaaaacattatcgggcctaatatttgggccttattatggcccaatgttgactttaattggaaaggaattcggttcgggtcgggtggttaaacggatcctaaacaaacccggcagatctcacacactatgagagctttccctctcttttcccctgcggcggctaactccgaccacttcagtgtgaagaactctggaatttaggggaatcaggacggttttagatttttatccgatcatcgtcaccgccgtaagttagcgtcgtctcagtaatggatttgtaagagaaatcggaaaggtcgcggtagagtcagtgattataagaaagaaaaccctagcttgtcgctttctttaccctctcggtgtttgtttctgtttccttcaatcatgacgtctctttctattcaaccatttccaggtaaatcttctttgtgttgctattgatgtttgagtctctgctatgtttttatccttagctactcaagtcgtgcgcctgaacttgggctattaatgttttacatatcatgttagcttcagaatcatgttcatcattcaactcttataaaattcgagtttgtaacactgatgcttagagtacattgatttgctttttgtttttttctgatgtttgagtctctgctatgtttttatctgaccttacccgctcaagtcctgttctaagttcatttgattcagaatcgtgtgctacttaggttgtaacttttatcatctgattttgaaattttcaaaaattctatgtcgacagagatttcaaggatggctagagatttggactcgcgaaagaaaagaaggatctctttagatggaattgctgccttgtgtgagcattccaaagagatcattgattcattgcctatgttgaattctcctgactacttcttgaagccatgtataaacgagctggttgagcgagaaattgaaagccctgattattgcagccgggttcctgattttactattggcaggattggttacggttatattaggtttcttggaaacacggatgttagaaggttggacctggatcacatagttaagtttcataggcacgaggttattgtttatgatgatgagagctccaagccggttgttggtgagggacttaacaaggctgctgaggtgactctggtcgtaaacataccagatctaacttggggaaaacagcaagttaaccatattgcttataaattgaaacagagcacggaaagacaaggagcaactttcatctcatttgatcccgataatggtttatggaagttcttcgttcctcatttcagcagatttgggttgagtgatgatgaggcagaagatattgcaatggatgatgcgccaggtttgggagatcccgtaggactggatggtaaaaaggtagctgacattgatgaagaagatcagatggaaacttcggagctagagctttctcattctctcccagctcatttaggacttgatcctgaaaagatgaaagaaatgagaatgctgatgtttcctaatgaagatgaagacgaaagtgaggactttagagagcaaacttcccatcttatgacatccttgactaaacgaaatgtaagaccttcgcagaaaattgctcaaagaaatagtcatcaagaccctccaccggtcgtgcgcaaaactccgcttgctttgctggagtataaccctggtaatgataaaagctccccaggtagtatcctgatggtacaacaaaataagaatttggcagtgagaaagtcgaaaacgggaggtttcgagctggacatcagccatgtcacaccgttaactgataactattcccgcaatgttgttgatgcagcattattcatgggaagatcgttccgagcaggttggggcccaaatggcgttctttttcacactggtaagccaatatgtagctccagttcccagatggtattgtcttctgtgatcaataaagaaaagatagcaattgacaaagtggtttgggatagaaagggaaaagttcagaaagaacttattgattctgcgtttgaggctcccttaagtctccacaaggaattgaatcatgtagaagaagaagttaggtttggctctttcagtcttaaacttcagaatgttgtcaccgatcgtgtagttctttcagatatctgccgaagttatattggtataatcgagaaacagctggaagttgctgggttgtccacatctgcgaagctgtttttaatgcaccaagtcatggtctgggaactcataaaagttctcttttctgagagacagagtactgaacgtttgatgtatgcagcttctgataacgaggaagacgtgatgcaggatgtgaaggaagattctgcaaaaattgatacagaagctcttccgcttatccgaagagcagaattcagttgttggctccaagaaagtgtcagtcaccgtgtacaagaagatgtgagtgatctaaatggttctagctaccttgagcacttattctttcttctaactggacgagagcttgattcagctgtggaacttgccatatctaagggagatgttagacttgcttgtttgttgagccaggctggtggatcaactgtaaaccgcaatgatatcttgcagcagcttcacctttggagaaggaatgggctggattttaatttcattgagaaggagagaattaagctttacgaattgcttgctggtaatatccatgatgcgttacaagattttacaattgactggaagagattcctagggttgttaatgtggcatcatctacctcccgacagttcattacctatcatcttcagaagctatcagctcctactaaatcaggcaaaagctccgtggcccgtcccaatatatattgatgaaggacctgcagatgggtttgtaagcgacaacaagcattctgacatcttgtattatcttatgcttctacacagcaaagaagaggaagaatttggtttcctgcagactatgttcagtgccttctcttcaactgatgatccacttgactatcatatgatctggcaccaccgaggaattctagaagcagttggagctttcacttcagatgatcttcacactctagatatgggatttgttgcacagcttctctctcagggcctttgtcattgggctatctacgttgttcttcacatacccttccgtgaagatcatccatatctacacgtcactgtcattcgggaaatcctgtttcaatactgtgaaacttggagttctatggaatcacaacggcaatttatcaaggacttgggtatcccttctgaatggatgcacgaagctctggtaaggacaccataccactcttcttttctacttctgctaaaggttcttgtggctcattgctgatttactcattgtgttgcaggcagtttattacaattaccatggagatttcgtaaaggctcttgaccagtttattgaatgcgcaaactggcaaagagctcattccatttttatgacgtcagttgctcattcattgtttttgtcaggtaagtctcttcatttccttatttgcagacccaactattcaactagaacatgatcccggtgtgatgtaggatggatctagttggagtgatttgttttgtctttattaaatgcagctaaccattcagaaatctggagaattgctacttcaatggatgatcgcaagtctgagattgaaaactgggatttgggtgctgggatttacatgtcattctatttactaaagagttcactgcaagaagatgctgatacgatggtagaactggtatgtctacgtttttttatagtcttatatttgttgaccaaactgattgtacaacatatcatttcttgcactgatgatactcaacaagattgtcttaaacactggaacttgcactcctatgatcatgggcataagagtctttttattctcgatgtgtaaacacttttatgaatgatacaaacaacataactccttggcttccacaggaaccccttgatagcacaaacgagtcttgcagaaattttgtcggtcgtttaaacgaatcattggctgtttggggtgacagattaccagttgaagcaaggtaagtacttcatacgtctcccacttgctaattaatagcattgaataatcgtcaagaactactcatggcttgcatgaacttgtatgatccttcttcattctatgcgtttgtttgtataagatatagataattcctaggatatgaccgcttacatattaccaaacttaaaaatgatacataatggagcaattttggatggatccttctaaatttggtggaatccatagtaattgctcctaaactaagtagatggcttctgatgacaacacagcccaagtttgctgtgtggacagatacgggtcacacattctctgttcgtcactttttagcatattggttacaaatacacagttaactcaccaactctttgaatgctgcagagtcgcatactcaaagatggctgaggaaatatgcgatttacttctgtcagatctgagtaagaatccaagccgagagactcagctaacatgctttgagacagcctttgatgcccctttgccagaagatgtaagatcaacacatctgcaagacgctgtgtcactcttctctctatatctctcagagacgggccaaatctcagcttagtaaaacagacattattattctgtcagaaggtcttttaacctgttgtgtgtgaaacagagtcagtttgtgtgttgcttctgttactacacgaccttagaagcgtgaatgagttgatttggtcgtgttgttttagcaaattcccaaatcttatacatattttgtgaaagtaaaggtgaaaatcaatgtaagtggaattgtattgattttcatggcttattcatagctgaactaaattctcaagtacaattgaatgacaatgaagctacttcaacttcaaattattcgtagctgctttgacagagagaattcttgtgatggagaaatatgagttaataatattctgctaatatcataagctttggtgatgtatttgaattgtcttcatgttctaatgctaggcatctgcttttcatcattaactttttgtttgtaaatgatatttaaatttcttgaataagatttgccgaaagtgagatatacaagtaaggaatctaaaaagtttgctggaatatattctccttcttctttagtttttttttttttttttttaattcgtatctcttgtttctgattgctactgaccgagaatttgatatctgactgtaaaaataaagtccaaaatctgaaaagaaaatgcaaataagattacaaaaaaaagaaaagaaaaaggtttgcatattaacaagattacagagcacactcgcaattaatagaagaaatacagagtggtctctctagttgagagatcaaaaatggatttaccaaacaaagccaaatttcattttacttatagtcaaacggaggaagatccgagagtcaatggcgatgaaggttgcagagcacgaggacgccttttcctgcttcgaccgcgaacttgaactgaaggagacgaagaagacgacgaaggagtagcaatggtagacctctctctgctcgatacactcgtcagtttcttcttctcattttctgcttcacatgatttgtcttgattgactctgttgtttccaaacctggtcgcgtttatagtcgcaggaagcacacagttgcacatgaagcctatgtataatcaatcaacacacaacaattcaaacttgagagcacagaaacagagtcctttccaaatatggaaagttaaagccaacaaacccaagtcagaagctattcttatcgatcatacgcataaagatgaaatctttcaagtcaactccgagaaaaaagaagctaaaccaagtcacaacattatagtctaaaagctgagactttataaggcattgagtattagcatcacaatacacaatacacacttacaaacataactacttgattcagtctctttgtctctaacttgtacaatcataaaagcccaaaatgtaaagaatgagggaagttaccagagaatttaccgattcgggcaaggcggttaacccaactaggaattggattcccagttaacttaatacaagtttcatcgcagaaatggttgcagttcttggtgataagattgtaagaacttcctttgtagttgtcagcaagttgctccatagtagctctgacttccaaaggaccaagatccgttttaccaatcaaaatcgatttcctaaacgtaaagccttcacattgcttcggctccccttcgaatatcccagtgcttggatattcatgagctccataagcatactctataccatgaactataaataccaaaaaacaaacaaaattctttaaaacttcaatatcttgctcaatgacttcaactgatatccaacactttggaatttggtgttataaatgacttgaaatcccaataataatccgatctaacatgaaatgactatttagatctaaaacatgaacgcccggagagaagaaaattcaagaaatccaagaaagtgaaagagtgaccttcaacaccagaatggtaaacgccaagaccaagccagtaagcatagccattaatgggagtaagatcgtagacattcagataaaccggaacatttcctctgtccaccaagcttgagtttttccggcaaagcattttcctttctttcaaattcttcctcttctttcaaaggttttaacttcttttttcagtcggagaatcgtaatgactccgccattttcctcactggagagaaacaaagcaaaaaagacagagaagaaagaaagaaagaggtgaaagagagtatcgccggcgtcagaaaatgggccggagggaagtacttccgatgaaagatgactcggtttttatataaactgtcgaataagttgatgacaagctttaccctttttctctaaattcaagattattaaaattacacaaaatgccaacgagacttgtcttttgagatttccgatgccaattatgtttcctcttttcgattaaaaagcctttagcaacagaaatgagacttcttgcttagcttttattactagttttgaatcttcaataaataaatctacttccatatatttatgaatccattttacaatttccttaaaactatttatgaatcttttttcttaaaaccgattaccgcgaacgatctagataccttatagaatgtttatagccaatgattttataaatgcatagaacttaaattaatattggcggtatgctttaataatttcacagtttattatggggtccaatataaataaagcttaataatattcccctatctttggctcaactttttgtctcgagaccacactttttctttttaatacactcacaatttttttttttttaattaaggtgtcaaagtggtgcgactaattatggtgcaaagtgggaatatatatatagtacaataaaccattttttcattgcggaaaataaaaatttggggggaaaaatgacactaatcatggatctatgtttgtttattgaatgtaggtagtgtccacaaaaatatcataatcaatataactttgcgtttattcatttttttcttacaactatataatatgatgtacaagatgttgtaaagactataaacttaagagttacaagttgtatgaaaagttcaactttctatctttaatatatgaaatattagaggcctgccactaatttgcctttggttaaccttcaaaataaaatgtttccctatcataatataataatcattaaaattaattgaacagaaaggggaaaaaaaaaaggtcaatatcttagctcacaaatagaatccaaagctgaaaaaaaaaaatgaaaaacaaactgaaaacaaaaggtaacaaatatttgttgacaaacataccaaatttgattgaaatttattacaaagtcagatgatcacaattgacacatgagagtcttaaattcgctatctgatcgaaccaataaccctagacccggtacggtacggtcagatccggttattgtggagaccaacattagcctcaagaccgcgttttgaaacgctcatattgtgtggaaaatgcgcgagtagtgattggagctgacgccgggagagatcaagatgattcgcggcagaggctcgtggtccggattatcgacccggttgaagctttacaggacccgacgtttctgcacaaaaggagagaataaactcgagaagacggaatctagcgttgcgcatcacagcgacactgaatctagtgtttctcgctacgatgagacctataagaaactcgataagctcgatttcgttaccgctgcgaagatcttgttcactgaaccacccaagaagaacaaatttgggtaatttctaccggagatttggggtttaaagagggttctactctcgaatgcgtgcaaacactcttcgctgatcttgtcctttgtttagtctatcagatgctataatgtgtttgattcatgcttctataggccttaaatcatggaaagaccctattttttcaacttaccttgtatattttgaagttaattttaggctacaaaacctcaggattgtagaattgtggaatgtgagcttctttaggctgaaacaagtgaactggttttcaatttctgctgcgattatctctttgactttctgaaactatctcttatatagtaagttgagttcttgtgctgctttgtgtttgtagtatgttctcatatggattttgctttgtgttaggtttgattggcatgtggtgcaattcatcatcgtctgcttgccatctgtaggtattgccattcactcccgttatcttagttgttatgttcaatgtttactgtcaaatgtgacttgtttataaatggctattgtttcttgtaacagctgtgtatctggttgctcaatatgctcgccggaaaatgaagatcatggatgctgtgagttctccttattgttcattatcaaactgatatgagtttctgatgatgtttcagtcatgtcttaatgtttatcctctgtcttcattctggttattgttagcatatgcctcatgatattggactaattctcaggaacttggagagaagaaaaggaaagaagaagaaaagaaagagaaagaagaagctgaacaaaaggcattacaagtagaggcagcaaccaagtctcacgaagagctaatggagatgagacagagactgggaaaaatcgaagagacaataaaagaaattgttttggaaaccaagaaaccttcagggaatgctccaaccaaaacccaagaagatcaatctactaaactctccccaaaagaagtatcacagccagaaaaagaacacaagggcaatgtacagaaaccaggtgatggacctcactgagatgattagaagggaaacttaggtggtagatgacgaagaatgtacccttctgtgggttattattcttttggaactgatacactagttgatgcagttctctcattttacttttgtttgttgaatcacctttataattaatatagattacaaggatttgcaagctataagagctacagtttttttttttttaaacttgcttccatttctttgtacaacataacaaaacaacacaacatctcatgctaattcaaataggtcaagtatgctactttgttgtccaaacatagacttgtcctccagctgtggatcctgcaagcgttccaacattataaggatggcaatggattctgcatggtatagctctctgcagagggttatgcagttccatcactgttcgctttagttttggattgatcacatcaatcttctttgacaaattgcccacatagatgtatgaatcatcccacccccatactgccctgcaatcaaaatcattaccaacttcagtttttcgacaaatagacgaaatcaattcctacttcttttcatttctcataacaaaaaagagtggaaaaagagtgtattggtcagagaaatagtgaaagactcataacaattacttgtggattcttttgtcagaacacagtacattaagcaagaagtgtattggaactgagaggcttattaaggtacaagatactggaacatacttgaatttggagatccatctgctggtgttattgtgatatatcatgcaagtgttctcaaaattggcgccgcttagaacaccaatgtagttgtcaaggctacaaggaaaacaaaacaaaacaagagttcagcaaaccccagagatgcacatagggacctacattatacatcagtttcactctctctacacatgtttactcttgtctacgttgctaaaagtttatgagatgtatttatttcccgtctcaaaaccatcaaggcacaaagttttctagctaagtaaagttcccagacataattgcttcaaggcagtggtgttttttcaaatatgtgcaacttttaaaccgaaatgcacagactttatgacctcaacaaaactagaacatatattacttaatctctccaatataatgacaaacaacatttgatgtgacttaaatcaaggagattatacttgtagttcttaatgaagtgtattgaataggctgtggaaaaaatgacaagataccttgtagttgcaagtgaaaggccagaaggtgagaaataagcagagtgcacagccctagaatgattaacagtagacaatgttttcggttttttggctcccatgcttctcaagtcccaaaggcaagcagttccatctgtggaacttgtcgccatgacatgcggattctgcgggttgaagtctatagagttaatcctccgttcatgtaactcccaatggaaaactgactttcctgctcggaggtcccatacattgaacactccataatcctgaccaaagtacaagctttgctcatcatttggtctctgcgagagtgaaaatatagcttcgtccgtggaataaaccagatcaaaaaccgacttctcgacatccatcaaccggatgagaccatcatagctgctgctaataacctgccatgaatgcaccaacgaacttgatgacttaaagaaagagataacgtttctccaatttcaatagacaactaaataaagacaagtcgtttaacaaaaaacttacccttgataaagagttttgctgaaacacaatagatgaaactggtgctgagtgaggagtgaatagatatatcccatcattatcttcctcattcccacaatccaaattccaaaacccaacattcccaagtttgtcccctgcagcaaccatcttaacattctcgcaaggtaagaactggacaacaaaaatcctcccaggcacaacacgagctacattctgcggttctaaagtcaacaaatccagatcaaactcaattttctcaggcttaaccggaatactaaattccttgttcacataatcactgaaggaatcatcttcaggctcttcctttttaacagaaactttagatacacgagaactactcctagtcctcaccataggagactcgttctcatccttaaccactccaatttctcccttaaccaatttgcctctacaagacttactctcaatacccaaaagagtatcaaccaattgcgtataagaaccgtatccttcatacgcggattcgaagggaataggagccaaaagacgcggcgattgcttctgaggagatggttggttgtgtgtgatctgagaacccatccggaaatctgaaaagccatcaggtaagccagcggaatctggattcaaacctctggtgcgtagagacattcggataacagtgggcgttgaagcaggtttgggcttcttcttcttaaaagatttagaatcatctcgagagcgtttggcggcggagagaagagaagaagctttggcgcggacattgagagcagccaacatctcatcgttccgtcttatgttctccaatctcttccgctcgtactccgtcgccattgattgattgatgcttgagaaaattgagattttttctctttacacacaaacaaaaaaggagagatttttttcttcacaccaaaactgaaagaagacctagaagaaaaagaaaaaagctaacaacatttgatgggtcggaaataggcggcagaataacaactgccgccaaaaaaataaaaaaacgaaaatatataattacacatttacaccaaagtgtgatctaaattgaacggtgcagattagtttaacatttatcccaaattttaagaaccgtacgatggagcatcttaatgacttaaaccctaaaagaagaaaaaccccaatcgagctctgtcaatggctcgcttcgtcagatgtctgagaagaacactcttttctaattcgtctccttctattgctcaccggagccctaggattggtttgcccacgaatctaaatcctaaaattttaatcagccgcagatgtctgagctccgggagttacgtctcagaaatgcagaaatcagctttccagggcaacattttgcgactgatccgtaatgagattgagtacgaactcgatcactcgcctcctcttcaggttctctatgaatctctttttttttggttctatattctttaagccttctaggaatctggttttggaatagtgttattgatcaattgattgttttggcatgagaatcatataaatgttgatctgtatagtgtaacttaggttgatacaatttgtaaactattggatgaagaaaatgttcacatctctgcaatggcctctctgttttgggatttgcaagttttttttttttttggcaagttgcagtgacctcttataaacccatacgttagctagtgacaactttctagttcgtctacaatgcatttccatgaacttttgcttccatttccgacatttctcccactggctacattgaataatactttgagcacttttgcttgtacaaatttgcagcctcctaacagttttggtccattcactgtggatgaacggcctggagagcagtggattagcttgaaaaggaattttggggataaagaagacatcaaaattgaagcaactatgtttgatagatcagttcccacgtcaaaatctaccaaaactgaacctgaatatattcttcacatcactttcattgtcaacatctccaaggctggtgctactgaagctttagagatcatgtgttctgcttggccagataccatagagatatcgaagctctgcattcgtagaggcatcaacacttcaccctcttcctatggtggaccagagtttgagtatggccactgattcttttcttcaacattaaaaatttgagatacaagaatgaaataactcaacttattggctttggcatttggttattacagggaattagatgatcagcttcaagacgcactctatcaatttttagaggaaagaggtataagcgacgagcttgctgttttcttgcatcggtatatgaagaacaaaggtaaagctgagtacgttagatggatggagagcgttaaatcctatgttgagcaaaaataggcatcagcctgcagcaaaagtcttcgatcttctactgtttggttccatggaatgctcagtggccgttgtgtatgtgagtatgactctctttgatttggatatgcttcaagaaattcatttgcaacaaattttgtttgctgggttcttagctagcagattgtgtaaaaactattccagatgcataattgtgagcatgggtactcatttgaatactcacatcatttcagcaatacacgtcacatatttctggtgtctcttgtttgctctgtttcttaccagcaatgaagattgaaagtgtcttagttaagtttgtaaaatgatggcttctcgggtaacttttgtttcccccttaggaacttgttatctaacacttttgactctaacttgtgacttccaaatcaattctagtgttccttaacagagtagcaacttttaaattttaattccataagtgtggtggtaactgtagatttacagtgaaacaccacaagttaaaagggacaagccagctgaatccgcgtaattagtgaagacatttcactaatctcagttctctggattagatttcgaatatgattagaagtgaagtttggattttttgttcatttgattctgttgtttggtagaataatcaataaggttatttcatgatgtaaaaatctaataggcttttccgtgtatctgtataatgaaaacgtcattatctaatagaattttggatatgtttctactgtgaaatgtgatttttgtatgttcataaaaatcttaaccgatgtgacgtatttggatcatgtgggggattagtgaggtaattatggtgcataacaacatgatttccgcgtcgttaacatcttgatttgtggaaaaatattgattgttaactgcaatgattatcattatattaactttagtgtaaacatcaacttgatacggacctactcaaagcaaaattcacagaatctttgggttataattcattaaatccaataataatactaattaattttcactaatatagataccactccccctccccccccccccaccccacatggccaaatatcattacaaaaattagaaatcgtgaagtgtgtgaagtaacaaatgtaattattataaatagatatgcactaatgcagatgtttttctgagttcttctactcgactaaattgaacaacgctaaagtttgtcgaaatataaattcaaacaacgcaaaattagtaaattttatttatgaaatgataaaagcgacatgacaagattagattaaaaaaggaccatcaaaatttaactttaatagtcacatggcaataaaaacaacaacctctgacgaacaactctttgcttgtagattaatgtctgtttcttttaactacatgtaggacctcctcacctcgataatcacattgtatccactctgtatatttttttcccttagaaaatgttaaaccttgcttatggtgctttattttgtcattttataatgtataaatcttccactatactataaatggcttttttttttggtaaacgaatatatatgaatgactttttattttgtcaaaagaaggaagaaaaaaaacaaaactctacatgattgatttacaccgaagaaatatattgatattgattgactaaagtcagctcacgtctaataattcggtgacaatctagtgggcaataatacgtataacgtaggacatgttttgcttctcttaacgactatatcccacaataatttgtacttgcatctttttggatattttcatcttattattacgtcgaactaatttcaattgacctttaatatatgatattcatcttattgttatgttatagttatacatgtgatgtccacatttgtaattataataactacaccagtctaaagctatatgtaccgtacgtggacgacctaaccttttctccatatagtccattttaatagttgttagtattgtactacatggacttaaaaacagacctaaaatattgaattacatcaacaaggtatcaatgaaatatataaaaagtacaacttgatcattagtgaaactctaacacaccctgccgtcaatcattatatcaaacaaagatgagaataaaaaaagttataatgaagactaaaaagaagatggcagagctcatagcttaagagtcaagtcaattttcttaaactgattatgatcttcttggttgctcttgaaatgtccaattctctccaacttagcagcaaccatgttactgttattatttccggcgacttcaaggtgaaatttctccggcaacatctttcctatggtcggtttctggtgaatgctctgtttgaaaacatgacttaaactcgtcgtttgtcttcctaagaagctgggcttatggatcgttgaatgagcttgaatccctaacgttgacctgttattcaccgagccatgtaatggtaacgatgccatgcttgcgaatctgctgactgaaccgtggccaaacgcaaacgctgaagaaggcaaggaggagagagtcatcttgtaatactgtccacgtttggctaaggtgcgctcacgtttatgagcgttttggtgaccgcctagcgcttgtgaactatagaactttctttgacaataattacacgagaacactctcggatctgccaattgttcttgctggtgctgatgatgagaagtcgatgatgagctggttttgaaagaatcgatgagattgagctctgatgaggtcgcggttccacgtgacaaaagggtcaaccccaactcaagatcttgatgaccttgtttcttgatttttaacatttcttgatctcctttgatggacggttccatgtatattctgtgtaatatatattatagcgtagagagaatatataaagagaatgaaagtaaaagaattgataaagatgtgaactgatgtggtcgtgggaagtgaagtgtgagttctatttatggaattggacggacatgtgaccttttttcaaattgaatgatgtttaaagaaaaaaggacacttttgatgtgtgcaatctgacctagagctatagagcccacacatgtaactgtatagtagtggacacttgaagttaatgtcgtagttatatgaattattgatttatctgggaacacatataatgagtgttcatgatatcatgttatactattgtaaatttgtaatgaatgctataagtagctctatcttaatcaaatgagtttgtctttgttgtcacctcgtcgtttttctttgttataatcatattatcctttttcattatacaaacgatttttggggattacaaatatttatccgtatgtacgtatggatcctttatttagggtttaggtgagacgtttgattcaaaaccctatatgaagaagctgtctttatttgtttaagtgttaggtgagttagcaatttggacaaggattatgaagccaatcaaatctccccgacaatcactttcgttccgatttttataatccattttttcccattttcggttgaatgtccagaacttcaaagccatacacacccatctcacataaaaattcattttttatgattatatattcattcttggtagcttaccaaatcatatatgcaccattgatataatgaattccttttgtatcagttgtgttttttgtggttctatccaaaaagttgtatttatagaaacagaatggtatgatcgtttcatagaaaagtaaagtatgacctcatcagatgcatttgaaatttttatatactgtatgtagttgataaatgaaatgttatataatttcttggtggctcgatgattgaaattacgattagcttgttagtgctaataacagcagcacatcattgcgatctgatcgcaagacaataatattacgatgtagtgcataccggttcaattttgaatacatccaactgtgatcttatcaccaaacatatgattccacaaaatttattattgatttattttgaatgaagaccatctgctgaaaaagttaaaaacacatccacctttactttcaaaagtacattttttgctttcatcgtagctagtgacttatgaggtgatgcattttgtttttattttgctttgtctaatcaatttcgacgacaatatatctcctcctagattaccttgtcggtcctacctccacaacaaaagtttatggaccaccctctcattcttcaatatcaaaaaaatatgaatgtccatgaataatagaacgtctaaagctacattcttaataatcatccatatttgatttgatcaatcataaaattcttcggtttacacaatttgcatgtaatttaacaacgggatgtgtctacaagtaattaaaaatgataaaacacacaagaaagaattgacactttttatttagaaaaaaaacgagtatgcatgcttttatttcgttgtttggttatctatttaactataacaaagtcgctaactgctacactagataactcggaaacattgagagaaatggaaacgtgggtttgttccaaagagatagggaacataacttcaataattatcttgcaactcatcaacctactacctcttgcgaaaattaagaaaaagaagaatgacttttagtcccgagaatcatgtactacactaatacctcatcaacgtcgaacacggcataactttctatgggcccttatattaggcccattaagatcaatagaatgaggtaaaaatcgaaataacccaaaataacgaggagctaaaggtaattagagatgcgctcggagttgagattctcccgctcactccaaaagatatccaaaacttggaaattaattttatttcctctttaatttctccataattcgaaaaattgattttatttcctaaagttttctcattaattgtttgttacactccacaacgctttttttattttctccataatttggaattgattttatttcctaaaatttaacattaatatatttgctccactagtcacgactagtacatatagacctcgtctctgcaacgcttcatcttttacttgctcgtcttctctgcgaaaatggcagcgagaaacaaacaaaagaaacgcgctgagccagagtcagatctgtgcttcgctggcaaaccaatgtctgttgtggagtcgacgattcgatggcctcatcgctaccaatccaagaaaacaaagctccaagctccgaccaaaaaacctgcaaataaggggtataactttacggggtttgtctcttttatgattttgttgcttagcttctgtttgctgattttgttttacagtggcaaaaaagaagatgaagagataataaagcaagctaaatgccactttgacaaagctttggttgatggagttctcatcaacctaaacgacgatgtctatgtcacggtatcgtttttgtcaatctgtgtttacattttatgttgctacgctttctgttttgttgagatgttacgtggtacactttccatggttactgtcaatcatcgttgaaacttttcttgtttccatggttaatgtcaatcattgttatggtacacatattgatccttacgtcattaccatgttgtgttgttatgttggtaaacggtgtgttattattaccatgcagggtctaccagggaagctgaaattcattgcaaaagttatcgagctctttgaagctgatgatggggtgccgtattgtcgctttcgatggtactatcggcctgaagatactgtgagttgtcattgcgtttgactattatttgattccctaattacatactaatttatgtatctcatttgtctcctatagttaatcgaaagattttcccaccttgtgcaaccaaagagagtgtttctctcaaatgatgagaatgacaatcctctcacctgcatctggtcaaaagtcaacatcgctaaagtcccattacctaaggtataataacactatatgatttcaattggcacagtctatgaaccgtttggtgttttgcttcttatgaatgtttacactaattacaacagattacctccagaatcgagcaaagggttattcctccttgtgattactactacgatatgaagtacgaagttccttatctcaactttacaagtgcagatgatggtaattgagtttttattccttagggtttcggttttaattagcttccttttaactgttttgtccatgttgtagcaccatcctagacttattactgttctattgtatgagtattatcttatatgagctggtcgtttcaagtgcaaatgagtgtacttgaattttattagcttcctactaattgtaatgtccattttagttggtttctagcaccatcctagacttattactgtttttgacttgagtactatcatatcatagttggtcatttctaacaaatccttaacacaagctctgtttttttgcaattttatcattcatatccttattgattttcttcctagtattttagagagaatcagaactaatgattttttgttttgccaacaggtagtgatgcctcatcaagtctttcaagtgactctgccttgaattgctttgaaaatctccacaaggatgaaaaattcttattggatctatacagtgggtgcggagcgatgtccacaggtttctgcatgggagcttccatatcaggagtaaaattgattacggtaaatcttattatgaattttgttatgaatactcacttaccattttgctgtatttgagcaagagtctttctgattttgcagaaatggtctgtggatataaataagtttgcttgtgatagtcttaaacttaatcatcctgaaacagaggtaagtctttattggtgatttttgtaaagtttgttaggagcaaagatacgatctccactcatgtaattaatttattttgaacattgtgcaggtgagaaacgaagccgcagaagattttctagctcttctcaaagaatggaaaaggctctgtgagaagttttctctcgtttcaagcaccgaaccagtggaatcaatttctgagttagaagatgaagaagttgaagaaaatgatgacatagatgaggcaagtactggtgctgaactcgaacctggagagtttgaagtagaaaagttccttggcatcatgtttggagatcctcaaggcacaggggaaaagacacttcaacttatggtattgtttcctgaactataaatccgaattctcaattagttacaaacaaatttcatcctttttaagagataattcaaacatttttatcttttatttcatctcaggtaaggtggaagggatacaattctagttatgacacatgggaaccttactctggcttagggtaacttttctatattaacctagttttgtattgataatttctttgataattactttatatttctccagcaactgcaaggagaagctgaaggagtacgtgatagatgggtttaagtctcatctcttaccacttccggtaagataatatctttgctttatatgatctttttaatataaagctatttacaatcttaactaaatgtttgatgatttttcagggtactgtctacacagtgtgcggtgggcccccttgccaagggatcagtgggtataaccggtatagaaacaatgaagcaccgcttgaagatcagaagaaccagcaacttttggtgtttttagacatcattgacttcctcaagccaaactatgtgctgatggaaaatgttgtagaccttcttaggttttcaaagggtttcctggcacgtcatgctgtagctagctttgttgcgatgaattaccagacgcggttgggcatgatggctgctggatcttatgggctccctcagcttagaaacagggtttttttatgggctgcacaaccatcagaggtaaatatatgttacagaatatttaccactaatatattgtcttttgaggaacatgatctttattgctctctcttgatttgtttgacagaaacttcccccttatcccctcccaacacatgaagttgctaaaaagttcaacacacctaaagaattcaaagcaagtgtggacagttgtacatttaaatttaatagactcttataagttataactgcattgcttattcatctgttataaatgtaggatttacaagttggacgtattcaaatggagttccttaaattggacaacgctcttacgctggctgatgctattagtgatctgccaccggtgtgtatctaaacttcagaactgccattgatgattatgttacaatatatctgtctgatcactgctctcttagtgctgcaggtgacaaattatgtggcaaatgatgtaatggattataatgatgctgctcctaagacagagtttgagaactttattagcctcaaaagatctggtgagcattttaaactcgtaaatttggtaggtaccactaatccaatactaacgtatctttcttgtttcagagacacttttacccgcatttggtggagatccgacacgcaggttgtttgatcaccaacccctcgtattaggagatgatgacttggaaagagtttcctacataccaaaacagaaggtgcgacatttttaaagtacttgcttcaagcattcaatgtataatcatttcttgttcatgtcattgtattcttattgttacagggggcaaactatcgcgacatgcctggtgttttagttcacaacaacaaagcggaaattaatcctaggtttcgagcaaagttgaaatctggaaaaaatgtggtataaaataaaccactcgcaaccttatcatttttctgctctagtttctttttgcaccttctatatgacatgtcttttggttttcacaggtccctgcttatgcaatttcattcataaaaggaaaatcaaaaaagtgagtttctccaactaatatgcttcttgtggatcctctttccataacgtaagaatgttaaattcattaaaagtaacacatctgttatctgaatttcaggccgtttggtagactttggggtgatgaaatcgttaacactgttgtgacaagggctgaacctcacaaccaggtaagcccttttgctttcatttcccatgtgtctgggtacgttccacttagaattctctagtggctggtttattaaaactggttgatgcagtgtgtaatccatccaatgcaaaaccgtgtgttgtctgttcgtgagaatgcgagattacaggggttccctgattgttacaagctctgtggaacaattaaggaaaagtaagtccttggttcttgctgcttttctatctatgtatatgattgtttttaaactggagatcctaatgtatgtaaaaactgggtttgaatctaaattttgtaggtacatccaggttgggaatgctgtggcagttcctgtaggggttgcattaggatatgcctttggtatggcgagtcaaggactgacggatgatgaaccagtaatcaagctgccattcaagtatcccgaatgcatgcaggcaaaggatcaaatctgattgacagtctccatcaagtcgtcatgatgaaactatctttaggaatcatacttcattttctagactttcttttaattttttgggttagcaagagctatatgctcaaacaatggcggcttaaactgtctagctctttcttgttggtttatctttgactttataatcatttggaaccattttatttcttatgatttttaatctcaagatttcaaattctattgcgtagacttcaatcctacgtgatgccatccaacaagaattaagaccaagcaaaagacagacaaaacctgttattgagcatccgaggtgctaggtacgtccgtgatctctcgacgaacattggttcgattttgcgtaattcagttgccaccgaccgaccgaaactctggtcaatgatcaccacttaccagcttttattagtgttattcattcattcgcaaaagctaagtaaattcgaaggcagttaggcccacaagcccatataatggtgaaagatttggttcacccaaataatgtccccactccttcggttgggcttttacgttataatattcggcccaaatttgatatctcataacagagcaaatttttcacatagaagaagcagagaaaccaattgatctactttttttttttttttgtttcttcctcttcatcaggcttgttcttcgattccctcacttaaagaagggtttcgaatttgctcgaaagattgaaaggaaaaaaagaaagaggtgaaccattctcaacataaatttgttgtttaggagatgtaagaatgataatttcttggatctaatcgcgttcagaaagtgagaaagttttaggattcataaatatctttgtgttcttctccaccctaataaacacattgatacagagatggaggatgaacatgttatgattgatcttgatgacgtttcaaggcacattgacattccagcagatgctccttatactttatcagttagttcaatccaattctttcatttcactttttgcattctcttgttttataagtttggttttgtttggttctcatagggtttggatactttgaatccggtgttgaccatagatggcaaaatgaagctggtaattctcttacttgcaactagtacaattttccaagttcagttactctttttgcttaaaccattcttaatcgtgttagatttgatgatctctcaggtaggagaatatatagcaacgattggtacatgccttgctttctctgacaaaggttagtttcacttttcctctttattatcaaacatggaaacacatgttattgtttcaagtaattattctgtcccttcaagatgctgatttggggttgcggtttcttcatttgtctgtttgcacaaggtgataaccagacgccacagaagaagacagttgaacctgttgccaaactccacaagattctcaagtttaggttagcaccattagacaacgaagatggagtaacaaaaacaaccaatttgtaaaagtttttctcttgttcaagtcattggaaacctgacttttcttcaaagatcatattaaaaaaaagaactataacaataaccgacagattatatatgtagctaaggcacatgcagcatcttcctttgttggcctcttgaaagtagcaatcaaactaagaccaaaccaaaaggtaactaaacgattcacaacttcaacgtacgttttcatgatttgtccttctgatgatgtcaataaaataaaaactgaattgaatcaaccagtgatggagaaattatgcatcccatgtaattaaaagaaacaaaatcacacaagatattataaaataaaactaggtatattcaaaggcagtaaggccttacataagcccataaatattgggcttttttagcccaatagtattatgagtctggcccggagcgtaattaggtctggtggcaaagttgttaataacacaaaagagattttagttaataaaccctaggcttctcaaatcggccattgctaccaacttcgacttggaattctttcagccgccgtcccaattgctttgccgccaccggtaaatttgttcccccttttccgttcttcttatcttgttcattctgttggtgtccctatagcctcactttcttatagggttgagttcagtctctgtttataaacttttttcgcaaaaaaattcaatctgacaatctgttttgtgttgtagaagcaaagagtagagagataatggctgaggaagaagctaagggtttggattacataccggagatagtactgaagaagaggaagaacagagatgagcttgcctttatcaggaagaagcaacttgagttgggtaattccggcaagaagaagaagaaagtctctgatatcaaacgtcctgaagattttgttcatgagttcagggctaaggtacacttctttttttccagattctctgaaaaacttttgctttgtctttttccattcgttttactgcctcaagttctgatttttgcttcttgacttttgtctacaccttagaagaacttgtttttgcttattctttgagttaaattaaagctatacatcaacctttatgattaggttttgtcacttatctcttagactgtaacttttctacagataattttgtgtttctcctttgagatttctccctagttttgcaaggttgtgcttaggacttgttgtttcttctgtcaatcctgcattgttctctgtaatttaactgttccctttttgctaattttatccctacttaaggaagtagatatgatccggatgaagcaaagagtaaagaggccaaagtcatctcctccaccagttaaatctgacctggttttcatcatacgcattcaagggtatttgatattctccaattagctttgttttccccctggagttttaatctttatctctgcctgtttcttatccttgccttttctttctggtgaccagcaagaatgatatgcacccaaagaccaagaggattcttaacaatttgcaactaaagagcgtctttactggtgtatttgctaaagcaactgacagtttgttccaaaagcttctcaaagtgcagccttatgtcacttatgggtacgtagagacaatcaatcctctttcaatatttccttgttactcgatttccatgctgtttctctattctcgtatgagctaaccgatgtttacgattcttgaagatacccgaatgataagagtgttaaggaccttatatacaaaaagggatgcacaatcattgagggaaatcctgttcctcttaccgacaacaatataatcgaacaggtaaaatttcctactcttaaaagtataggagcttattccagataataaccatgctgttcttaatcgtttccacttttgttaccttaggctctaggagaacacaaaatcttgggcatagaagaccttgtgaatgagatagcaagagtcggagatcatttcagagaagttatgagattcttgggacccttgaaactcaacaagcctgtggctgatgttttgcaccggaagaaacaagttttcagcgaaggaggagataccggaaaccgcgaagataagatcaatgatctcatcagcaaaatgaattagaagcagcaatcgttgtaatcgctagctacttactatattttccttaaaagatctgtacgaggctaaaaaccaaccattttgatgaaacacttgcaattttggttaaagggcattccaaattttataagcatcgtcgacttcagatattatattatacacatatatttatgtgatgtaaacagagtaatatagaagcgagtgtttttcatcttctgaagctcctcctctctttgggtgcttcatcttcctctggcaacttgacaattgtgtatgtacctgctccgattaacgctccaagaatgggggcagtgaggtaaacccaaatagctctgtaattgtttgctgcaatggctggacccagtgttcttacagggttcatcgaagcagaagttgcaggtctgttggacacaacatcatgatcagtaacatgtattattatgtacaagaactgaattcaagaaatgatggtttatttacccagctataagtatgttaagcatgaccgttgctcctacggcaattcccgccaactctcccacctgtaatcttgtgattagttttcattgacgtccaaaatttcaagactcttcaaaaacgttttttataagtaatttacagctctcgtgtcggtggctacggctgtgacaacgaacatgaggttgaagctgataatgaattccaaggcgaaagcttggctgagacccaccgtcggcaccgtcacgccaccgctcatcgttggttcaaacactgctttcagtgcaaacgccgcactcacggaggccatcacctgagctccgatatacaccggcacctaacataaatttagacaccaacattattatttttataacaattatatagaaccccttttatatgatcagattttatatatacttttattacccatgttaaaattcaattcataatacaacatgcatgtgcatgtctatagatttcatgtggttctctcagtaacatccaaaaatgtgttaaaacaaataagattaaactactgacgtgtttccaagggaagtgtttgagagcagcaaaggcaatggttacagccggattgagatgtgccccggagatgtgaccggtcgataatataacgatcataaccgccaaaccagccgaggcggcgcaaccaataagcgtctcagctccatctgtcttctggttcacgatcgccgtcgctgttccggcgaatatcaggatcaatgtcccaacaaactctgctcccaactttacaagcacatatatgtactggttcaatgctcagtgaattggaaacatgatttatatggagtgtacttgtaatgagaatgtgtacatatgtaccttgcggtagagggaaacgttagggggagggagagagcaagtgaccggagggagtcttccatcttcaagagcccattcattgtcaacactgaaacatttgcagcttttgagaagtgactttggtgtgtatctaccattgtgtccattcctcttcccttcgaatcctccaaagagcggcgctcctggagtccccggggttgtcgccggcgttgagggcgtggatggaatttcctcatgatccatgtcgagggtagagatagatgagatctaattaatttgaggatatatgtttttgctatgattgtttttatgtgatgtagaactaagggatgcgtagggtacggtatttatagaggaaggcatgagagttgacttatgagtgaaggacccaaaatagatgattgatatttggttggagtgaggagtaagtgggttggtaatccttagttttaatgcatgtgtcctaaggaagactctttacataacatgaaatgttgctatctttatgagaatgggtcgtgtattgtatctttcatatttctatttacatgatacatgtatcgtgtactaaagaagcttttgagatggagcaataattgtggatccttttctctatcgatcgacatacattattttgcataatatgttcttctccatgagaatggaactcttgcgtttgtgtggttgtaagttgttagcaaagagaatgatgataaaagcgatggttcttgacctttccttgtcacagaatgtgactcacagtcgactctctttttgtaaggaaataaatgatttgttttagtgtataatccttgcatgtattaacaccaattatcgatgcagatggttgtatagtttgcaagtataaaacatgattcctcccctcggaaattcaaggctttattaagcctttaatctccccatgcaaaaactatccgcaaaatatgcaattatgataagatgtatattattatcacgttccaagtgaggctcaaattaaatattcttgtttactaacaaaagataggtgaaaacaagattttacatgtcaaataaaagatttctgtgagatgtatattcttatcattaaaatttaaaatcacttttgagttcatctctttatttaattctttcgaatgactcttgcatataatttgtatacttttaacgttattccttttctatctataaaaaaacgaagaatctgtgatgacccgtcacaactctttagaatcaaaattaaaacactaatttattgctttgtcctcacaatcgtatgactatgaattgaagtgtcttggaacaagatttaattataattatttctctaaggtataagtttcttgaaccttattcgcttttataacttatgcccaagtatacatacccttttctaagttttatagaataagtagaggagtgagctagtggtctcggtttagattaaaaaactatgtgtagatatagataagaggtctatatatccggagaatatatacctcctaagactaagatagtcatttaaatttcgtccattcccttcaagttaaatcacattatgtcatagaataaaaatttggtacagtgagaacgcagatataatcgaaacaaaacaataaatcatgagaatgtattaatgcgtgtggtggaaatagattgttgggagtggaggaacaaatcaggaccgtttgaaagatgtgaagcgactgtttgttctaaagccccacgtcacatcgcagggcatcacagacatagtaactgtgagatttcatacattattaatttggatgattttagtgaatccatttacttcgttgtaaaaagattactcaagtctgattagttacttttctaaacacaatgcttgtaatatattcgacaattctatatagcataatttttatgtgcatgttaataacaacattagtgactataaatgatagatggtcaaaagacttcaaaaacaaaaacaaaaaaaaaagtaaagaggaaaacaaataaatgtaaaagaaatgataatgattttgaaggggatgtatctaagagtagaggggagggggtgtaaatagaaatgttgtagggtcgaataaaattgtcaaaagtccggtccaaattattttgtccctcactaatcgtggctaccatgaattgatacaactttattccattttcttcttaattagttttacaagtatatcattatcataaataatagctggctcccttcactgtgttcgttgagtcttattttgtcttcttttccttttggtttttcattcttttgtgggttgggtaaccataatttgacatgatgttttaaattagcatatcatttatttgtaatatacataaagtttttaactcttctgtatataaatgtatgcacaaaatatctaacgatgtgtataagttttgtatagattggagtttcatttgtttgaatcatagttttgaataatgtatatagtattagtctatacgaaatgctgtatgaaatcataatgtggcaggtcataattatttgaaacaggttatcgtgcatgcttaaaatttataaagaaaaacagtgactattttctaaagctattcacaactcatcaggagtttgatactcatcctaagattgctactgaaccacacaattaaagtgagcgtgataatagtcgtgtcaaacaacaaacaatttctcccaatctttttactccattaatcgtcgttcgatcatccgataatcttttgaatccctgagcagatcataacaaaaacagagccgtgcgtgaacacaagcaaaccataccaacagtcgagaacatgaaatatttataccgcgattaattcttcacgtgcttcttctatctcgtcattgcttcgacgttcttttatatatgacgaggatcgtgttcctaatctctcctctagctttttttattcaattctttcattttcttcttcacctcctcatcatctccatcatcaacttgcttcatcattttttttagttttacttggcatgtaccagtaaagttctagttccaagattggccacacaaagttttaactaaagcaagcctgacaagtaatcacccctaaaagacggaaacgacacacgtttttacgtaacacaaaaaatggttaatctaaagcccaataaaaggcacattggttcacattaagaagaaggagcactgaaacaatgatttaagtatggtaatctagtggaccaccaataaaaagcccattaattcataggcccaatattaacaacctgcgtttggaacaaactcacttcaactacaaaactcgaccctttgaaataagaagaagaaatctcggtgagtttttttgtggagattgaattttcttatctacctccactattcaatcgcatggcgtcagaggcccattagaaaagtcaagccaggggttttggattagatcgttcgttcttcaatttaaaagttttcttctttcttgttcggaactcagaaacacgatgaaattggcctcgagcttggttcctcatcaatggcgtctcttaacatcaccacagctttctctacaagctttcattttctccacaggtacttactttgtctctgattttgtcatccatggtttcgttttacctctctctctctcaatcttcttcagcctccaccacaaagtctcacactttctggtctccaagcttgcgtcaatgtcggaatcttcagacggctctttctccaatcgtcagttctagctacttgcccacttcctacatcactcagaagcagattgaaatccctacctcccctgtatatatattgaacccttgtttactccaaccttgggtttccaactttgtgtttccattaagacaaaaacacgattttggatttggtttgcaggaaaaacaatcgccaccagtgcaggaaggtttgggtgcttttcaaaaactgcccatggtcatgccatctattgatttgtatgcttctgctctcaggaagtctaaaagagtccaaccaactaaaggttatttgattctttatcttgttgtctttgtttacacattaacttcttcaaactctttaactgagtctttgtccatttttggtctcaggcattgctaatattgctaagcgagaaagaaatagaggtgctaaacagcttgatgcattcatgaaagtaagttcattgcatccttcgctgtgttatggtttaaattctgaaacgttaattgtctttaccaaatcagaaattgtttttttgtgaaaggaactggctctacctttaaaaggctacatggaaagttttcccaggaagaaactcttgcatccatatgaaaggtctcttattgacttgacacttggtgatggaaagtatgaagaggtatctatttttaagtaattcagcatcttagcctgcaactgattttagcaaaggcttatagataagtttttaggtgttaggaaaagttgatgttctgaggaagaaggtgcaatctgttggaaaggaacatgcttctctctgcgccaaggtcagactcctcagttccgtcaaaagcatattgtgtcttacattttagttaatcccatatactgtagattgtgattggtactacatcagtaaaggccttataagcttcataccgatcccatttttttcatcttattctatcatatatcagtgtaggaaaagttaaacatctttcaatttcgttgcaggctttgtcaaagaaggaggcagaggaacgcttgagcgaaggtgtggagaagctggaattggttttccaacaacaagggggagctgttgatgatttgctaactatagcgaaggttccttactagaatcttttgtttgtctcttccagtgttatcagaattgtatgtatgaacagagttacgcactttgcaggttttgagggctatgccagttgttgacttggaaatgccgactctttgccttgtcggagcaccaaacgttgggaagtcatcattggttcgcatactgtcaacagggaagcctgaggtctgccttatgtaccaatctttatatatgtgataataacttgcattgtctaatgcttatggttttttcggttgtcagatttgcaattatcctttcacaaccagaggaattctgatgggtcacatcgttttaaactaccaacgatttcaggttgcgttgcttacttcgctgcgtctaatcactttcctcatgatatagattattgaatcatccagaaacgcattgcaggttacagacacccctggccttcttaggagatgcgatggtaaagtctagttgctacgaactctcatgtggatgaataactatatgatatttgattaagtcttgattcttgtatttttttatttggtaattacagaggataggaataatctagagaagttaactcttgctgtactcactcatcttccaaccgcggttctatatgttcatgatctaacgggagaatgtgggacttctccttctgatcaggtatatagtaagaaacaaatccttatggatttcgttgcatcagatgtgtcaaaggaaagcacaagaatgtgcaccgttatctgatttgccgaataattgggtctgatatatcctgattcagttatatgtttgttgtgagggcattgcagtttcaaatatataaagagatgaaagagaggtttaaggattacctgtggattgatgctgtgtccaaatgcgatctgctgggaggctcaccggtgatgtatgccaaagaagatagaagcagtgatgacgcggaaatcattaagtaccgggaaagaggacctgatgaatcaattcatgtctcggtgaaaacagaacaaggtctcaatgaggtatgaaacttaccagaaatatttaatgtggaaagaaagcaagagtgtgttttgagtggtctgtttctctacatggctctgcagctaaagaacaaagtgaaggaagtactgagtagtgagatggagaagatccaaagtggagagaaaactgatcaaagtgttgctacttgctagtgcttagctagagattttttgcccattttagcattttgacattaatgtctcatttgtttttaatatacttaaataggattaaaatcttaatgcattatatatacatagctatttctctcctcccttgttagtagtggatttggtacgcatatatatatatacatatataagttttagcaataatgcaggattagattgtttttaaaaaaagagaaaaatgttgccaaaggaaaattgtgacgcacaaaaaaaggaacgatcctgaaattgtcagaagtagacagaaacaagaaaacttgtggagaacaataaaatatcggattcagaacagagattaaaaaaaaatattaaaaaaatagaaatcgataagtaataataatattatctcttcttctctgcttccattttgggtatcgataaaccaccacatccttccctgaaaccctaaccacaacaatcgccgccgtctctagaaatatccatccacctacttcggctttgtttatcaggttcgatatatctatcaccaccgccttcttatctcaatttctgtgtttgatttttgctttgttggtgtttgattttaccgcagattttgatgaaaccagatcgggtcttcctctagatccgttctaggttttctatttccaccgtcttatcattatcatcatcatcaattcatcatcatcatcaataatccagatgctcaccaaattcgtcattcatagacatgtctctgtttctgaaagacgattcgattcaaattcgcgaagtctggaacgataaccttcaagaagaaatggatctgatccgagatgtcgtcgacgacttcccttacgtcgccatggacactgagttccccggcatcgtcgtccgacctgtcggaactttcaaatccaacgctgattaccactacgaaaccttgaagacgaacgtcaacatcctcaagatgatccagcttggcctcactttctccaatgaacaaggcaacctccctacctgtggcactgacaagtattgcatctggcaattcaatttccgagaattcgatctcgattccgatatcttcgctctcgattccatcgagcttctcaagcaatcaggcatcgaccttgccaaaaacacgctagacgggatcgattccaagagattcgcagagctcttaatgtcctccgggatcgtcttgaacgaaaacgtgcattgggttacattccacagtgggtacgatttcggatacttgctaaagctcttgacttgccaaaacctgccggattcgcaaacagacttcttcaagctcatcaacgtttattttccgaccgtgtacgacattaaacacctgatgaagttctgcaacagccttcacggtggtctcaacaagcttgcggagttgctggaagtggagagagttgggatctgtcaccaagctggttcggatagtttactcacgtcttgtactttcagaaagctcaaggagaatttcttcgttggtccgttgcacaaatattctggtgttttgtatggattaggtgttgaaaatggtcaggttgctatctagcaaaaaattaaataaaaaatttcctgaaaactattttctctctttttccattataagaatgcatcatcagacacttataactccacaaaatgtaggatctaaattcaaaataatttaatgaaacatgaaaatgaagaggtatgatcacaattgtctgaaagttgaactgttttgtgtctgaaaataaagaggcgaatgggaaaaatgttagttaccgtatggatatggttgcgtgggcctaatataaggcccactgttgctattggatagggccattaaattgcaatcagcgtttagttggtattattgaatctcaagcctcttcttcgcgcaagcttcggtcatcatcatctgaggttagtgacttgacactcttcttctccgacgattctgaggttcattttcgtgacatacggggtttctatgtgattactgagaactttgcctttcgcgccggttctcgttgattttttttttcgatttaggtatttccatgtgagactaacatttgtggctcgtttactcgcagatcaaagggacagagaacgtgtctgggtaagttttaatggtgtttctgggttattgctcttatttcctagttgcgaatctgctgatttggtgaaggatatagcgttctaggtttttttaacttggtgtctgtgatagtaaacgcatttactagttattgtcaagattttgattacttacatcgttgtgaccatcatttcgattggtcttcatatgtgcttttgcctgttcatttatctaatggttctctttgttttgtttggcataataaaagtccaactcttagttgcttaatttcttctattctaacatgactcttagaattctcactacagaacctgttttgtttcttaaatctgtttttcgtcaactaatcctataaatctggtgattacaggccacctactaggatggataacagttctgatgaagagtcagagatcagtgagtctgagatagatgtctattatgaaaaaccttacgagaaactgatgaatggggattacaaggttaaggtgaaggacacattcaggtgtcccttttgcgctgggaagaagaagcagcattacaagtataaggagctacttgctcatgcgtctggtgttgccaaaggatctgcgagtagaagtgctaagcaaaaagcaaatcactttgcgttggctaaatacatggagaacgagcttgctggtgatgctgatgtcccacgcccacaaatcccctcttcctcaacggagcagtctcaggcagttgtggatgacatttatgtctggccttggatggggattgtcatcaaccctgtaagaagaactgataacaagaatgtgctccttgattcagcctactggttgaagaagctcgctaggttcaatcctcttgaggtgaaaaccctttggcttgaccaggaatccgtagttgccgtcattcctcagtttaacagtggttggagtgggtttaagagtgtcacagagcttgagaaggaatatgagattaggggctgcggcagaaaggactggattgataaaagaggagactggaggtctaaggcttatggttggtgcgcacgtgcagatgactacaactctcaagggtcgatagcagagtacctgtccaaagtaggaaaactgagaagtttctctgatatcaccaaggaggaaattcagaataagagtattgtggtggatgatctagcaaataaaattgctatgacaaatgaggatctgaacaagctccagtacatgaacaatgagaaaacgctctctctgcggagggttctcatagagaaagacgagctggaccgagtttataaacaaggtttgtactgaaaactgattgcttgtgtttcaccatggctgcatccgagtttatgtttgtgtcgtctctgtacttttttctccagaaacaaaaaaaatgcaggagttatcgcgggagaaaataaacaggatctttagagaaaaagagaggctaaccaatgaactggaggctaagatgaataatctgaagatttggtccaaacaattggacaagaagcaagcattaactgaactggagagacaaaagcttgatgaagacaagaagaaggtaatattttgtcattatagtatacttatgcgttgatgtttccagtgtactgatgatctttttgttttcctttgttatggcagagcgatgtcatgaacagctccctccagttggcttccctggagcagaaaaagacagatgatcgtgtcctaagacttgtggatgaacacaaggtctgttttcagtaaatggtcaaactagatttatctgtgcgtgtcaaattccacacagtttaaaaaaaaaaaaagttccaaaaaaagatgtcttgtttgcgtttaaagattccaacattcttctttctgaactccagaggaaaaaagaggagacgttgaacaagatccttcagcttgagaaggagttagacagcaagcagaaacttcaaatggagattcaggagctgaaaggaaagctgaaagtcatgaagcatgaggatgaagatgacgagggcattaagaagaaaatgaagaagatgaaggaagagctagaggaaaagtgttctgagttacaagatctagaggatactaactcggctctcatggtaaaagaacgtaaaagcaatgatgagatagtagaagcacgcaaatttttgattacggtaatatattttaaatgcttccatgtttttgggtgctagtgtaatatgtagagtgaaatgttggtgacatggtcaaacgctaatcggttgagaaatctgtatgatgaggatgcacaagggtgatttcccaactgctttaggtttctgttaaacagcgttacagatgctcaccgtgatataggtccataatctgtgaatagttccgagcggccataatggaacctgagctgtgaatgattaattgtttgcatgttatgttttttttttttcaggaattgagagaattggtgagtgatcgaaacatcatcagggtaaagaggatgggagaacttgaggaaaagcccttcatgacagcatgcaggcagagatgcacagttgaagaagaagctcaggtgcagtatgccatgctttgctcgaaatggcaggaaaaggtcaaggattcagcgtggcagccattcaaacatgtggggactggagacagaaagaaggtttgtttatggctcatgttacatggaaattctttttgagaagcatttgtctggagaactagtagtgatggtgttgttatatggaaatggtacaggaagtggtggatgaagaagatgaggaaataaagaaactgagagaagagtggggagaagaagtgaagaatgcagttaagacagcactggaggagcttaatgagtttaatcctagtgggcgctactcagtcccagaactgtggaattccaagcaaggaagaaaagccacactgaaagaagtgattgattacattacgcagcaggtcaaaactctcaaacgcagacgagcctaaaaggtaatcactatgttgttccttcagtttgtactttgtagtattgtcttctcattgatcttggtacacaaaaaatcttaagctagaaatagatgtgcttatgcattagtaaagtctacagatacgttttgtgtcataacttgcaaatatttttttttttttttggttttaagatatgaaaacatataaattaagatttcagctaattagttctatggtgcttgtgttgcaggaaacaaacatatgccggagggaatagataaatttggccgtggttgcatacttttaactgttatgtagtagtattggggcttttctggggatgccggagggatgaatttattaattgcaaaaatcctcgataagccccaagacctgttatgtagtattggggcttttctgtctcacggtgggccttttaaccgtttatttgaggcaattaacttcagatatcagcgatttctgtactgactaataattcgtgggcctaatgaaaggcccactgttgctttttaaacgggcccaataagttacaatcagtgagtttattttataaaaaaaaagattacacgtgtatctatctaattgcttcgcacagccagaggccatcggaggttaattcgtggattctgaaactcaattctgcgtcattagtgcgtttcgagtttctatgcgattgttgaacttgttgtgaaatcgcagataaatcgaatttcttactcatccgaaacgccttcaaataggaaacatgtttttcttgttttcttggatcattgctctcaatttctagttctgaatctgctgaattggctatggattagggattttcatttctacttgttatattttatatgcatttgttaattcatctatcttaaggttctctttgtcttgtttgctaattttgttagtgactgctcttcttgtgtttatataatgttcacaatgcaaatcggttccttgttctatctactaaataaaagttcatgttttatttgcactgtgactttggcctttctgttctaatgactaatgagtcctagaatttgctgtttgaagcgatgaggctgctcctgttgttcctcctgctgctgaggcagctgctattccggaagtcatctgctcatggtggctgaagactgtaaccaacctgattatgtatgtcaagcttgttaaagctctatgtgctgatcataacatcaatttgcttaccttggtgaatgggccggtgtaagtcttgtgttttctctgcatatagcttgtttagtttgtcatgtgatgctctttgttggggtttcgccttgaaacttagatgcttgtaaaatgaccaatgtatgtggtgacagctctgcaagatcgattcagaaggcaatgctaggaaagtggttggatgttcttgtgttgtaattaaggtaaagagagactcccttatactcaaaagctacataacttgatatagactcttgttctgtgtctcgtcatcacacttgtgggtttctatgattgaatgaatgcttttgcttgtcttaggattacggagagggaacaacatcgtgaagaagcatcttgaatctcactaaatgcaagagaaagcatttcaatgccaaatgcaagaagaatagagattatgtgctttgtttccccttgttggaggattgctggcggaatttgtttggatccataagttatgtaaggctctagtcttccaagacccatcacgatttggctctctttcagaacgatctcgttgcccaagttttgttacattggcaaacatttgacagctgataaaatttagcttgtttctataaatcaagttattattattcgtatcatcaagtaacaaaattgatcttacactttgacgattaataaggcgggaacatgttatcgaaaaagtaaacttttttttttacatttatggctctgcttcattcttcttcttcttcttctcaagtttcaacttttattattccaccgaatctgtgcatatggctaaacaaaatgaagaacaattatggaaacagatttatgattcaacacaatgtagatgttcattaagaagaaaaaataaaaacctaaatattgaatggataccagttgccttttttaccttttggagatgattctaattttgtaattagtaactcatatataaattgatattttttgcatgtttaactacaccgcttaacctcagaatcacccgaaagctctctcctttttcttgctctgaccttgaggatttcaagcgttgcctagaggatttgattacgttttgttagggttttgaagtttgagagattgtttggggaagaagaagaaatgactgctattgttggatttgaccagctttcgaaagcactcatcgatgctggaacgaatcttcttagccctccttcttctactgacgaccttcttactcttctcgatgtacactttcttcatcgttgcttttgctcaaatagattctcttaggtttggattcacggaatgcgattagggtttctctttcttgccgataaggaaaacttgattgttgattttagtcatatgtttgatcaaatctgggtgctttcttctgaattcgttgcgttttcttgtctatccaacttgttaatttggttaaaggcgaatccttttcttctaattcaattgtctctggcgtaggaaactgagtctctgcttaaaaatgtggagcaagatcaaccattatcaatgcaaagtgccctaattccatccaggaatgctttggtatcagttgaccttttaagccatcctgattctgatgttagggtttcagttgtctcttgcttaaccgagattgtgaggattactgccccagaaaccccttacagtgatgatctaatgaaggtaatatcaaatttcactaacactgtcttcaatgtcactgtctctctctctttactttatctgttggttcctacttctttggtatcacaggagatcttcaggttgacaatagaagctttcgagaaattagctgatgcctcctctcggagttataagaaagccgagtttgttcttgataatgttgcaaaggtcaaatcgtgtttggtgatgttggacttggaatgctatgacctcatcctacaaatgtttcggaacttcttcaaattcataaggtagattagatatacaaaaagaccttatttacaatacttgagacaaactctttagattatagactgaatgggggttcttttgggtgttcatctaatagatctgatcatcctcaactggtcttttcgtcaatggaattaataatgattgcaataatagatgaaaccgaacaagtgtccacggatttgcttgatagtctcttagcaactgtcaaaaaggaaaatcaggtaaggtttcttcttatttcaagttaattatctcgcagtcaatgaacttgggattttgatttttattctcttcctgtcttagaatgtttcaccaatgtcttggagtcttgcggagaaggttcttagtagatgtgctcgtaaacttaaaccatacatcatcgaagctttgaagtctagagggaccagcttggatatgtactctccagtagtttcgtccatatgccagagtgtttttaacactcctaaagtccacagtccagttaacaccaaagaacatgaggtattatatttggcgagcttgttcatttgtagagtttcagcatcttttaatagtgtcgtttaaccaaataccttgatctaggagaaattggatttggggcattctcgcaaggagaatctttctaaaagtagttccaagagacctgcaagacatgaaactagaggaatcaatgagaaggaaaaagttagaaacggaaacaaatctagtttgttgaaacagagtctgaagcaagtgaggtctgaaagtacagatgcagaaataacagggaagagaggacggaaacccaattctttaatgaatcctgaggattatgacatttcttggctttcaggaaaaagagatcctttaaagacgtcttcaaacaaaaagatccagaaaaaaggatctgggggagtatcatcactaggaaaggtgcctgccaagaaaacacctttacctaaagaaaattccccagccacgagtagtaggtctctgacgggttcacttaaacgaagccgggttaagatggatgagagtgactatgattctgattctctttcttcaccgagattgaagaaattggcatcatgcttccgggatgaagagccaaaccaagaagatgacagaaagattggaaactccagcaaacagactaggtccaaaaatggtttagagaagagtcagaaaacagccaagaagaagccagttgtagaagctaagattgtaaactccagtgggaagagactatcagctcgctcggttgctaagagaaggaatttagaacgtgcacccctagatactcttgttccacaatcatcaaagagaaaggttgaaaacaagacagacgatcatagatttctcttgtcgaaataatactgttaaaccttttgttgaatttcacgtttggatcaactgtgcagaagatggtttctcaagttgcagctagacaattggccaacgaatcagaagaagaaactccaaagagccatccgacaaggagacggacagtgagaaaagaagtggtataataagctttgttaccttctctccccatttttagccattgattgtcacctatctgttaccatgtgacatatggatttccatcttttaaggagtctgatggctttggcgaggatttggtcggtaagagagtcaatatctggtggccgctcgacaagacgtaagtgtattggaaacttgaaggttcttatttccaagtgtactgtaatccttgtttttccgttgatggtcttacactgtgcagattttatgaaggcgtcatagattcctattgtactcgtaagaagatgcatcgggtgagagaatatctctgatctgctattcagttctgttcctcctatcagaatcgtgcctgtttcttaattgattgatgtggaatgtttgttcccccactggttgcaggtaatatattctgatggagattccgaagagcttaatctcactgaagagcgctgggagttactcgaggatgacacttcggccgatgaggtacaagtttcttctatttgttttggaataaagtgtaatcgccgtgcttaatgattttcccacaatcgatcagcaggataaggagattgatctgccagagtccattcctttatctgacatgtgagtaaatcggttcattactgtgatctgtgtaaagttgcaatcttgatcttctatggtattaaaggtaatagtctattccggttcttatgatgttgcagaatgcagaggcagaaagttaagaaaagcaaaaacgtggcagtgtctgtggaaccgactagttcctcaggtgtaaggtgtgtgagaatttactaaaattcaagttattgtttatatgaaattttgatgatgacttgttctgagaggattggcgtgtatattgatggtgatagatcctcaagtagaacacttatgaagaaggattgtggcaaaaggttgaataaacaagttgaaaaaacaagagaaggaaagaatctaagatcgttaaaagagttgaatgctgaaactgacaggacagcagaagagcaggaagtgagtctagaagctgaatctgatgacagaagcgaagagcaggaatacgaagatgattgtagcgataagaaagaacaatctcaggacaaaggtgtagaggctgaaactaaggaagaagagaaacaatatccaaattcagagggtgagagtgaaggagaggactcagagtcagaggaagagccgaaatggagagaaacagatgatatggaggatgatgaagaagaagaagaagaagagattgatcatatggaggatgaagcagaagaagagaaagaagaggttgatgataaagaggcaagcgcaaacatgtctgagattgagaaagaagaagaagaagaagaagaagatgaagagaagagaaagtcatgaaggagttacatagagttagagcattgtaagctaaaaccatttcagaaagattctttctgcttagacgctctggtttatctttcttagtagatttgttgatattgaaccaagttttagatgaggtcacctggtttgtgtttgtgtcttgagagtttgtgacatttgtaattcattatcgttgttacatagtataaaccatatgttatgagccacacgcgtttctctgtcggttataaaaattatttacaacgtgcgaatttgaaattctgtgcactattgatagagaaaccacttggaaattgttacattcaaccatcttggactcgacggcttgaatgactaatgagaccactaatccttgtccacatcttctctcattctcaaaagaaggtattaaataagttaatactcaacaatcaacaacttaaatcaggtgacaaaaaaagaaattacttcaatcatagttgacttcaataatcatccttctttctttgttaaatctcatatgtaaaatagatgtattaacttgaaacactgttcaaagattggctcaaaaggttttgcaaacgaaagtataaactataggagttttaatattctattttataataaaaaaagggactattcttaacttattagttactactgaatctaattttttattactttcatcaaaaatattaaaatcaattatagttgttttaaccacgtacaaataatattagtttctctaactaataattttaatccttttttttaattctcttttatctttataaaattcgctaccaaaagacatataaatctaacggtcaataatgttgtacttactttgctgaaaacaaaaaatataaacgaaacttttgtcaggaagatacatcaaattaatctttgttaaacagactgaaatatggatataggttcaggggactttcctattagcaaaaagatggggctagattttaacttttaaaagtcaaggtcaattttctcaactactcaccaattgtttttttttatgtggtatctaagtaaaatagaaaaacacaaatttagaataagataatgacaccaaggagcaacaaataaaaaattaaaaaagcattgctgattgctcatagatttgtttgtatagaagatcttaaatagcatacgtacgattactaactttttattaagttcttctagaactccatatacatatttggtttataaacttattaattagttaggaattttttatttttgttgatcttaaaattcatttagtaatttcgtattcgaagtgttataacttaaaaaaaaacattaaggttccatatggcaaaaataaaataatgtaaaagtccgattcacaaacacctttaattgaccattttgtttggctttttaatgcatttacacttatcacctaaaactttgaaactaatgtacttctctagtactgttctaagataaacttagtaaaatatctttcacaataaattcttcatttaccaaacccacactctttcaatatatcagaacaaaaatatactaatctaaagtttttcagtttgttcttttgaaaaagaaaagaattatcataagttgactcaccaactctttaccatggttaagtaacttgttttgaagtctctatatatacaaatcactaacgacacatcataacatactactctcttaagccctttcataaccttgtaaaccattaagaggctttgctcaattacaagaagaagaaaaaatgcttgtcgacgggaaactcgtctgcgtcaccggagccggcggctacattgcttcttggatcgttaagttactcttagagagaggctacaccgttagaggaaccgtaaggaacccaactgatcccaagaacaaccatctcagagagcttcaaggagccaaggaaagactcactcttcacagtgcagatcttctcgactacgaagctctctgtgccacaatcgacggttgcgatggcgttttccacactgcctctccgatgaccgacgatcccgtaagtagacaattctattaatcggttgagtggtattagtatagtactcatgttttcttagttttcattttctaaattaatgtaactaattaggagacaatgttggagccggcggtgaacggagccaagttcgtgattgacgcagcggctaaagccaaggtcaagcgcgtggttttcacgtcatcaattggtgcagtttacatgaaccctaaccgtgacactcaagccattgttgacgaaaactgctggagtgatcttgatttctgcaaaaacactaaggtattgttttttttatctatgctataagttttcgagatgcgctgctaagtctttaacaaagagttttctgcaataaaatcgagcatgcggctagaattaggttaaatttcctctttgttttatcttccttatagaattggtattgctacgggaagatgttggcggaacaatcggcatgggagacggccaaagcaaaaggtgtggacttagtggtgctaaatccggttttggttctcggaccaccgctccagtcagcgatcaacgctagtctagtccatattctcaagtacctcaccggctcagccaagacctacgctaacttgactcaggtctacgtggacgtccgtgacgtggcactaggccatgttctggtctacgaagcaccctccgcctcaggccgttacatcctcgccgagaccgcacttcaccgcggagaggttgttgagattctggccaaattcttcccggagtatccacttcccaccaagtaagtcaagtttggctcttttgaacactttggtcaaaaaatatcaaagtcaacacgatttagttttagtcggtctaataaatacaacctttggtttacaaactatttcagttttgtttttgacacaccacaaaaattatgacttggagaacttgaacatatctattcaaaaaaattataaatatttagttaggataaaagggacatgagtggtatttggtattattgtgactcttgtcccatgtcccatatgttttaaaaatgagcacttgtggttgtggtgagattggtgtgtactaactctcacatcacaaagtccatgtcatctgtcacctactgctgacgttgaaatcttacaagatcttatagtacacgtgtttgggtcaaattccatttgacaaacacgtacgggggtgtgaatgttttttcttcacctactccaatatttggtcactagtttcatgacttgtgtgtctcctttagttagtttaataattaaaacgttacttcaaagtgatatacaagaaatccttttcacatttcgtattctgctgattaacaaaagtattgtttgttttaatgttactaggtgttcggacgagaagaatccgagggctaagccatacaagtttactacccaaaagataaaagacttaggcttggaatttaaacccatcaagcaatctctttacgaatctgtcaagagcttgcaagagaaaggccatcttcctctacctcaagattcgaaccaaaacgaagtcatcatcgaatcttaggacacgatccacgaccctagaatctgatcatacctacatgaaaagctttattcttaagtaatacatacgttttgattttgactaaagtattgttaaatcttaaatcattatatatagctgattgttctttctttctttggttgtaattgagaatatgttacgcatatgtattatacgataatggaagcaatggttttattatccgatgttattttaacgttgttcctatacaaaccctatgagactgattaaaaaataaaaagacaaaacgattcttataaagtctatcgaaaagaaaaagactttgtgaatggtttcactctaattattgtttaatcttatatcgttacatatatctatatagctgattgttcttttctgatttttttggtaattgaaaatatgaaacatcatgagtatgatatgataatggaagcaatgattttattatgccatgtgttattagaagtttgtttcctacgaagatctggttaaagaaaagacgcaaaccgattcatataacctttattctagtacactatcgaaaggtttttatgaacttggtttagatctaattttattggaatcctaagcttaatgatgactcagtcaacatcggaggtagatactctacatggtaactgcatgttgacaatgtcctgtcttggaagtgtctccacattttgtgagtctcttgaaataagaagagaagtggctactctgtttttccggaagacaaggtaagctatggcggctaaatagagagcaatgcctgcgaacccaagaattccacagaagacgacgaggataagcttcatatgactgtggataagcagtttgatgaaactgcttactagatagtatatgtttattcccatgattaaaccaccaatgacccaagtcaaagctgtaatctgtgaagaaagggaacatatatatgaagtcagagatgatcaaagtatctcatctttgaatgaaaatgtgtttgattattacataccgccattgggttgacatgtgaacccatcttggttttgcaacttgtgaatttgagaagaggaaccaacgcaaacgggagctcaaaggataagatcatctgttttaagatgatgatttgatttcatgaagtaagtcatatatataagtatacatgataactagagttagaaatgattttagtaccgaggcaatgatgattaactttccagctccagctgaaccaccgatgagagcaacaattagactcgggattatagctaaacatcttgttagtaagtttctgagccatggctcgagtctgagatcaagaaagccctgcattacatattgtccagcataagttccggttatcgtcgagctctgaccagaagcaagaagcgcgattgcaaatagctttgagctccattttcccacaacgttctgtttgaaaacagaggaaagacatcacttaaatgttatggaaaagaaacagaacaacaaggaagcaaacaatttacccgtagcagaaacgaagccttgtttaagtccaaatcctcacaattagctcgatcttcagggcttaagttgggggcattacaaacagccccgcttactgatattacagagacgtttatgagaaaggccaccattagagccaatccactttctatcaagtaaaacctgcaagcttccttgataccagaagcggaacgagggattttcctcgagagaaccaaggccgagtggaggaagagattatgcctgcagagaacagatgttgttctcagcaaagaatcttatgatgaatggtggtgaagagagagagtgagcttacggcataaccatggctccgagcaaagagattgcgagaccagttgcaccatttcctttaagttgaggaacaaagagaccatgtaggacttctcctgggtctggctttgagtaatgaagctcaacaaagaagcatattgcaattgtgaacacaagaaacgctatcaagaactccagctttctcacctgtattataccaaacattcataagaattcaccttacatataagcaccgtgaacgagaacaagagatgaaactaataccccgtatttttgaagtgcgagaagaatcagcgtacttaagcctgtcagaagaacaccgatccacaccggtatgctaaagagcatgttcagagcaaaagctgttccgataactatatatatatatatataagaaaaccgattttggcaattagtatcaacagagagaggttagtattgaatcacactgtaaagagtaaacaagtgtgataccttccggtatgtcacaagcaactactgcaatttcagcaacgacccataacataaagtttggaactttggagtactcggctctacattgctcagccaaatgttttcctgtagcggaatttagtaaacttggatcataaaactaaaagaaaagagtggatttttgtggtaacctgtgacaacaccaagattagcagccagagattgaatcaccaaagccgcacatgaggccaccaatatgatccaaagtaactgttattacaaagaaagaaatcatgattttgtaaaaaatgcaaactagtataagataaaagcgagggaaggagagtatgaacgcacttcatacttgtagtgtgctccagcttgcagatcagtctcaactgcagaacacaggaagaagaaacaagaatgaatcatctcaaatctttacagattattaaaaaaaaagagagagtaatgtgcttacagtttccaggatcaatatatgcgattgaaacaagaaaaccagggcctaagtaagcaaagaaattcttccagctcttcttctgcaaagttgatgattcaaaacaaactcattatcattttttgaatcaagattctctgtgttttttgtttagtcttctgatatgttgactctgaaaacgatttcttgactcagaaactggtacgcatgtgagttatgtttacaagataaaacataaaaacagatttacaaagccaaatcaatcaacagatttaaaaagagattataaaatcaacaacaaaagaaaaaagaagaagaaatgacctcagagacaataatctgattagaatcagagttctcgatgagtggagaattggagaagcttcggttaccgccggaactggaaatgaattgagaccgtccagatcctgtagccgccatcgccgtctctctcttcctaatctctttcttgtttagtatacaacaactccacaacgatatatatacatataatggatgcgactttttcgataagttattttttttttcttttattcttcttactcggggataagttaatttataggtgcattttattgaagattcttcttagataaataataaaaaaaaaaaaatggtggttctgtttttttgtacgtacctcggactctgaggaaaataaaaacagagtgatagaagtgtgtgtagcagaaacaaaatgtgttgcaaaaaaaaaaaagtgtgtgtagcagaaaaaacgaaaaagtgagagatctctgaaaaagcaagttcaaaccaagtgtttttttttattgggtcctcctcaaagtacactaaagacaatatttatatactctttttgtctcaacatgcatgttcttttctttctcagttgttttatcaaagttatgatccaggccaagaaaaaaatgtagggtaggtaagtcgaaatatcgtggaaattcatattattttaagataaataggattattgtatactagtttaaaccaaatttaatcggatagtgttgttaataaactagtagttgattgattaagagtttgagatattaaaatttttatttgtttccgtctgtttgagatattaaataaatagagaaaaaaaaacacacagacacagtcacagaggggacgttgaagtaggaaatgaacaagttgagtgggtgggtccactgtaatgggaagctaaaacgtgattggatctcagcgactgcgatcgaaggtgggtcctactcacactttcagttttattcatagatagattctctctaaaatgttttttttttttttttcatttggacggctttctcttctcttcttggcccctaatctaatcaacaccaatctttcttgttttcctatcaagattagattcgcttgaaatatggatttggaacacaaacatagttttcatacagtggatcctgttcgtcgaagctcattgatacaatcaaattaaagtcttatacttaaaacctaactatatatcaataggattgtgcttcgttgcccaaaatttctttgttattttattttggtaaacaaagtagaatcgctatagttgatttctatatttcagttctgttctgataactacttcttgtagttctctgaattgatacaagaactatgtcaactcttgcattttcattacggttttagttgcgtttactttttaatataaatggtttaaaaaattactgttagaaagattaaatcaaaggtatctgacttttttacacgtcaaacatgatttagcgagctaacagttaagagcaccaaacacggctcatataggtaaggcagaggtgtgaccgccaccagcccaagaaaataaaatgctaaaattattttttttggtaaaagtcttttacagttttatgtgtgatagaatttttatacttagtttttctttttcggagaaaaatgataactaagaaaataaatagtactttttgctttactaatctctctcctctaactgtcacacaaaattaattcctgaatttgtaaaaatccctttttgtaatgaagcttaagacatgattatatgaaatggtttttgttttagcatgtttgaaaagacccctttttgtaagtcgtcctaaggcttctcgattgtttgagccggtgctaaagaatactactatagctttacgtaagaataggaatgtttattttgaagatggaaagaataaagttgttttcactgtttatttagttgactcatgagatgcttttattacctttaagccgtacgatctaagatatgagccattgattgcacttaatattatcccaaaaaccgaagcattgagaatatgccaatgtttgattaatttgacctccacaatctacggccattatttatcaagaagaaaaaaacagcacattatatattctactaaggtactcaagtcttctaccacaatttcgaaactacaaatagggcactatttagcagtcaagataaaatcggtagatttaattatgatttttttcggaaagttgacttaagtacatacgttcttatcttatttatcatgcattatatttacgtgttttttgaacatatttagagaagctaccggtgtagagttatatgaaatgatcgcgacaatcagttattgttatatatgcgacctttttttgtttgagaatctacaagtgtaaagttatatgaaatgatcgcgacagtatgtaatttatatttatgcatatgttacagacttatagttatcactatcacatgatgtacattgttactggacaatatattagtgaattataaaactggaaacatatattttaaactatgtaaactggaaaagacttttgataaattaagttatctgataaaaaatgaatctactaatcgagagaagtactagtattttgtttggttatttagtcaacgggaaaaagggagaaaaaaaaaaaaaaaaaattagtcaacgtgaaaatttgactgatggcgtgaaactgcgagcgagtatgtgaaattccaactttttaaatggttgggctttatatgtgaacgtttatgggtttagttcaagcgagtaataaatgaaatatatgggctttacatattgagcaaagaatacccgtaacacacgctgcttattttctgtatacccaccatcaaattttgaaacgacgagtgatacaaaatacagtagttatatcattttggttaataacaaattctatttcgatatgaatgaaatgaagcaatcattcttaaaagtttaatgcttaatggtggggtgtaatccgatgcaagtccgtgttgggccaatttttttatttaagctaattgggcttagttgaattgaattgtgttaatgtgaaatgagccataattgattggctgagcttgacagtgcactagatatgcgatagcttttgaacatcgttattaagttttagtatttagacccatcacctgtattatttagttggaaaccaagagaactagataacaaaaagaaaaaacaatttcgtttgttagtcatatgtttttttcttcttaactactgaatatgaaatagttgataatcttatcacagttttgcgagacgtgtatagagatacaataattgtaaaggataggagtttcacgtgtgaatatatgctacttttttcaagtgtgcaagcctaaggctaaagggtaaaaatgaaatacatgttcataattttgatcggggaagacaactggccgaaagaatatacttacatgtttggattttttaccattcatatgcaattatttgtaggtttagatccaagggaccatgctataacaacgcaatgggatcatacaattttcttttctttcatgtaagttcagtctccaagcacgtggaagtaatatattcgtcaaagtttagacttcaattacatcatgtggaaggaaaaaaaattgataggaatagtagtatgaaactacgtgtaatattttattagatacacgttcgtgcgctgagttatctaatgaattcatcaggcgaataattcttggacagtcctttttgttttggtcggccatctagcaagactagtagtagactaccataaagaaaacaaaactatttcaacaaaacaaaacagacaagtgacaaaaaaaaaacgtaaagccaaatcgaaaccatcggaataaaaatattattctacaaaatagatgtcaaagaaaacgtgtaattcacggatacgcactgttactctgatggctaagagtataataatagtatttgaacacatatgagtacattttgatggcaacgtatattagttgaagagtctttcattagatttatgtccccatatgcaattgagttccacttctgttttatgttaatacacaatgaagtttctatagattttgtttttgcaaaaggaaatgtatatggtatttcaatactctatcacaactataaatagagcaaaattgtgtataactattatgcagcctttttcaacaaccaatgtaaaaacgaagtactaactactaaattaggagtaggagaaaagtaaaacaattcgcaagaatggaatctaaaatttgggattagtctttgattttcacacttggtcataaaaattaagtggacatggacattgaaaacgaaatccaaaagaccatttcgaaaaagaggcaagaaattatataataattaatatttaatagacaacacatgttttagacttttactagttcatgaatcgtacggccttttttgttcctttaactaagttcaatgcatcctctagtagacacctactgcttaactaaccaacataaaaaaatatgattaattctccccgaatagtattgttgtgttacttttacacaaattgaaaaaaaagtaaacgacagttattagttattttaaaacgaatgaaacattatgtaaaaatatgtcaaattaatatgcttagttaattagagaaagtcaagactttgcaaaaatgcatccaaaattaaacaaatgtatacccgaaagttcgagtgtgaattagttctgtcactaaaatattccgtttaaactcaagtcttataaaatgtacggatattataccttttgttttctcgagcttattataccttaaaaatgtaaattggatgaggatattgaggaaaaaaataagacttggaaagaaatattagtaagcttttattaaaaaaaaaaaaagaagagataattcaagacctgaagaagacaggcacgaagtagctaggggagggaatggggaagtaaaaccaaaccactcgtgcgttgtgtgttaggattttcccgagtcaacgaggtcaacggtcaaagaggtcaaagtctttaaaatacaggaaaggaattgtgctttcgttacttgctttcttacgttctttctgtcctttggaggagaatagttttgtttttgcttttgttgatttttctgtccactttgtatatatttttttttttttatgacttcatcacctgtgacgtctaataattccatcaccgactgcccatttcttttctttttattgtctctacaatttcgattatattttttggtcggcagccagtctcttcgttcttcttttttttctctggacgtccattcccaacatgcatagtgtttgacacaacaatatatgacagctaacttttaagtataattcgaaatgaactaaatcgttgattatacataagtttaggttatgagtttttgtcttttgcaatctattaattaacaattggtttgtgaccaaattgttcgttgagtgttgtaagaaccaacctatttcaatcagtttcttaaaaaaggaaagggaaggcaaaaaaaaaaagaactattagcagccttacttttctatgataatattagtcagtagggaaatatatatatatatatatatatatatatatatatatatatatatatataatttggaccgacgactgattacaataactgttaaagcttaaaccggcggaacttaatcttatataattaatatgattgtaattagctgtatgataattttatgttgttaatgatgatgtattaccttttcgctatagggtttatagattacatctatacttctgcatacaattagatattaataaagttataaaaacaaattaaactgaataattgtgtgtgtgttacgttgcatgtgttattagttatggagaaatatgatttacgtcttctgaaatgctatcaacgattggtttcagatttaaagaaactatctgaccaaaatcctgagatatcttaattagatatatctatttaaactttcaagttgttatatgttaaacagtaaatggcgttttccgtattactcatctagtagatcgtagtaagttatatacgtttttacaatgaaaggtttcggcaatgtaagttgtatacgtggtacgagtgagtatccatacttctaccggaaagaatagagatcaagaaaaatgaatataattaataaagctctaccgaggaaaagaagagtgaaggataatggagaaaaataagaaaaaagatgatgagatctgaattaagattttattattcacaattacaagaataggtacagtcctggtttgtgctaaaccaaattcgaatatcaaatataaattacttataggttcgactgtaaaatgagatatgaaagaaagaaataatatatgatgatgtaatgcatgagaaagtccaaaatgatcggcatatgggattaagcgattccatatagttaagtcaagttactatttcagataaatggataagtttgtcgtctatatgttctgttatctccaaacccaaatctataacattgcgacatttttgaatcgttaacggcaaaataagtggggaggggggggggaaggaaaaaaggaaggacactgagattttgataaagttcggtagccaaatttgtgcatgacttttaagaaaatacgtatgctgatccaaaaacaaacaactaaatagattttagtttgagaaaatcgaagtaacaaaattattatttaatatatagtgtgagaatttaacagctactaataattatcataacacgaattaagtgtaatagtaatatatgtaggaaaatggtttagcaccactcacttgattaactcgacttaaaccaaatataaagtaatatttatagatgtagttggttgtatttttgcaagctttggtactcgatatctaaatttttaatggaaaaattagtcgagtggtaattcgttatatataagaaaatattttgtttgtaattgtgcaaactttagcattggacatctaactatattctgaaaaatcagcggaatgataaaagttcggattttccttctttttatttaagtaaacataattggtgttctgaaaaccaaaagaaggaagaaggcaattaagatttgttaaagttcgtcacgatattgatgtcaagaaaaaaggaaaaaaaaaaaaaatcgtcacgatggtatcgtcaatttgtctagtggattttgaaaagccgtgtgggcttgactttgaccgaacaaggcacacgtatacatctagtactactgaagaaatctctcattagaacgcaaaccacgttccgcacactcttaatatactattagtctattactatcaccaactagttgtcattttttttgtcaaacgtgctaattaattcacaaatagaagtattaaacttcctaattaagcacgcctttactacatttcattattattatacatgtaatcaaccatttcttttatcccacatgtcatttgtagtcctgattttatgactttatgcatcaagttatctttttttttgtcactccatgcatcaagttatctaaacaacataattattgtctgaaaaatctaagatgatatacaacatatgtatttaattacacattaggcttgtttaacaattcttgattatttttactctttttgggtgagttcttgatggatgtcttgaattacaaaactacatattctgaaaatattaaccttgagtttaggccggctatgctataacgaaaaataaataaaagcaactaacccgacagaaatgtcaaccaactatccaaaatgaaaaacaaacgtggagagcgtcatattattagtaggccaatcacacaccaaatgtttgtttaacaaaaaaaataagaatgtcaaccaactatccaaaattaaaatcaagaatacatttcatatgtttccaatatgtttttcttaaacaaaattgggactaaagattggaccaaatacgtgtgcgggtggacccgatagaagccgagttgagtctaaagactaaaaagtaaacaaaaaatgataagaccatcacttagtttattgcatgaaaatgaaaagcacatgctcctctctctctcttctgcctctttccatctagtttcctcttaaaactccattatatatagaaacaaaatcttttctctcttcaacaatcccaccattaaaaaagaagaacccaagatcgactcttacttcgaatctctctcaactttcttcctcagcttacgggaacttccacacatatacatccacaagaacccatatcgaagattcatcctacatatatttacatggatcagtactcatcctctttggtcgatacttcattagatctcactattggcgttactcgtatgcgagttgaagaagatccaccggtacgcttctctcagattcttcattctccacatgttcagaaattttcaattatcatggagctttttaatctagtatctcatcattatgtattatacacttacatttttcaattcggttggttttgaaaatatataaactaactcaactatccatagacatttttttcagatgtataatctataaacatagatattttcttatacttcacaaatatttttatatataattggcataaactttaacaacaagaaaaattcgttagtaattcatgtggtgggttcttgaaatatagatgtaacgctagatcataaaatcatattaaacttatagtatgaagaaaataatatggttactaacttcatgcaatatatatatatatatatatatatatataaatgataaattgcagacaagtgctttggtggaagaattaaaccgagttagtgctgagaacaagaagctctcggagatgctaactttgatgtgtgacaactacaacgtcttgaggaagcaacttatggaatatgttaacaagagcaacataaccgagagggatcaaatcagccctcccaagaaacgcaaatccccggcgagagaggacgcattcagctgcgcggttattggcggagtgtcggagagtagctcaacggatcaagatgagtatttgtgtaagaagcagagagaagagactgtcgtgaaggagaaagtctcaagggtctattacaagaccgaagcttctgacactaccctcgtaagcattcatgaaaatgatcaaacttggtatctatctatctttagaaactttattttatatggtttactgattgtagaagttgtttcttataggttgtgaaagatgggtatcaatggaggaaatatggacagaaagtgactagagacaatccatctccaagagcttacttcaaatgtgcttgtgctccaagctgttctgtcaaaaagaaggtaattgataaagaaaaaaaactgactctcgcttaaaatatgaattggcataatacaaatttgatagacttattaatctgattttgatcctgtgtttgtttctattcaggttcagagaagtgtggaggatcagtccgtgttagttgcaacttatgagggtgaacacaaccatccaatgccatcgcagatcgattcaaacaatggcttaaaccgccacatctctcatggtggttcagcttcaacacccgttgcagcaaacagaagaagtagcttgactgtgccggtgactaccgtagatatgattgaatcgaagaaagtgacgagcccaacgtcaagaatcgattttccccaagttcagaaacttttggtggagcaaatggcttcttccttaaccaaagatcctaactttacagcagctttagcagcagctgttaccggaaaattgtatcaacagaatcataccgagaaatagtttagcttcaaattccgttagagtttttagatttgaatttgtcatgagtaagagaaagagagtagattataatccattgtgatactgaaaatgtaacatgtaatcgtttttcatacaatctccaatacattcggctttagaaactcctcctagtttgacaacaacaacaaaaatatctgtacaaatgcaaacacagcacaacagcatcctaagcagcacagagttaaaactattctctcttggtttttctttaattaccagtctcgtcctttgtcatgcagtcatggtgtctgaagcagcaagtgagatggtcgtttgtgagaccagctgtttgcatgaacgagtaaataaccgttggacttacactgcgaaaacctctgcgtacaagatctttgcttatcaactcggctttcgaagtcttcacagggacttgacgtgggtaccggaattggctctgagtaggtttctggttaacgaagttccaaatgtacttgtcaaatgatccaaatgcacctattatctgcatttgagaaaaccaataacagtaagaaaaaaaaaggtaatgttgttaagaaacacagaaactatgatcaggcttataggtgatatattaccttgcaaacttggttagcattctcgaggattgaccgtagcttttgctctgatagtaacgtggtggcagcaatctcaggggatgttatctttttatttgttaattcagatattgcaattggatcaaagtccatgaaaacctccctgtttaacacaaggcaaaagcatttcgagattcgagctcataaggagaagtcagaagatgtaaccacaacagcgttggtactagttacctgaatagttgtcttttggaaagaatgtctttccaagatagttcagcaagagcaccagacaagcttaataactcgaaaagtctcctgcaaacaattcactgaataagagagtgtatagtccaaaaaagcatccctctggtcagtaaaacataagtcagtataaagagaaaatatcacgtacttgtcatcatggacaggaactccccattcttcatcatggaaggcaatgtaacattgatcttttacaagaaacaaaaaaaaagaaagaaaaaaagtaccggttagtcatagcagatgaaaagattcaagcctttggaagttaaggccttagcctcatcggcgtagagaaatgacaaaaactaatctctacaaattcctgtttctgtggtcattgttcaatagagatatgatctgcctgatcacaaaacatagtcaagatttgctctctacattcacaaactaacttccaaagcaagagaatacaaatcttttaaactattcaacttctttatggacattgacaattcaccggtaaagccaagcatcactagtctatgctactacatcagagtaactgataagtgggaacaattgtattccaacaaaaaatgaaatggatgaatcaagagagattgtattaccagatttaggggtgatccaagcgcatcttttacgaccgtcacagaagcaatcactagccttctcatctctctcctccgtcagatttcttctcagtgaagaggaagaagaaactgacccacttcgccgcaaaaccctctttccactcgaagtagacgtcatacttaacggcgacgactcgcaagaagacgacgcatctgaagaatacgaagcagtcatcgaaataccattacgtctcagaattggagggcttagaggcgagcattgcggcattttctccgtaaaggttaggtttttggttttctcagccacaggcttcttcaccggctttgacaacggtttctgctgcagcttattgccggcgggaccaagaactgatctgaattctcggtcggatgaatccacagaccgaactcgcggtggagccgacattgacctaaaagtctccgaatatcgaaaatgccttacttcacttaaaaacacactggatcacgacgactaatgaattgcaattccccaaaagaaaaaatctcaaaccaattccaaaagatttacaccaatttcgataaaccctagaaagaaaggacctgcatttacaaacttaaattaaggtcgtcacctaaacttcttctagcgaaatcccaaagtaggatcacgggaatgagtaaggtttacacattcataagaaagtgaagatacatacaaaagactaatctttggaaatttaatgagaaaatccttattcttttttttttacttcggcgaacccaaaaaacaaaaataaagagacgacttttccgatcgagaacgataggaatccggagcgagtaaagagaagagtaccaaggaagagttgttgtagttagccagtcacagtttgacacgtcatcgtttggtttacccgacccggaaaaaccccgggttaaaatctaattagccagtaaggactgtttcaagtttcaaaactatgggtcttcttaactcttaacccgacaaagccaaactaaaaattagttgcttgcttattgcttaatgattactagacagattaggaatgttttgtcttctatcaaaaccatgccaagacaagagatttaattacaccataaacaaaacttcttctttcgtactcgagtccccacattttgtgtatttacgtagatttcacatagttttgaataatgacatatttttcccaaaaaagaataattacatatattcccgatattttgtgtttattacagatatttcctatagatttgtttattgcaatcgctccttaaagttctgtttattacatttgtttccattagtttttatttattacaaatgtgccctatatttccagttggttctttgcagcagatgcatcatcattggctttggcataaagggtaaatataaacttaatagtacttgcttcgacaattctgtagactaccgataacccgagaaaaggtaactgcattatccatgaaagtgtagcatcagtttgagtacaaaagagaatacaaactcataaagaaaacagtcaagacctgacgttcatgggagttgagctcttctaagactagtgggttatgcttaggaatcatgagatggatttggcacgagcatttggatcctcctttgactcgagaaacatcatgaaaacataaccgagagaccagaggagaatgtattgaaatggaacccaagagaggcatgccaatagagacatgatactcccaacatactgtggatctctaatgactccaaatgggaactctgtaacccatggtatgttcttcccgaatcgaacaccgtaataagtcccagcttcacctaacaattggtataccctgcaaagatgtgaccttttaagttaacaaaactttacaacaagagagctcagttacagaacatagaagtgtccaccatatcaaacatcactcaatatccattttgttgggacaaaaacacaacttcacctaacagtcaaagatgtgaccttcaagtatcaaaccttcacaaaactaaaccagattcgatgattaaaacttgaaaaaagaaaagacaaaactttcacaacgtctacagatgcaatttcaaactaaaaatggatttgactaaagatctttattatcatcgatctcatgccattcgattcgattacgaattcaacaaattgagagaggaacggaaacaaaaagattggacctgaagttgagaaactggccaaaggccatgagaggccagaagtagagcggaggcggccaggagagagaagcaacggagaagagagaaaggagttgagcagccttgagcacgtgagaaacacgtgccattaccgtcgatgggtctctttctcggccgcagagattgacccatgactgagcattcgtccacagccaccagtagaacggaaatggcaacagaactccgatcgcggccaataatcccatttcgctttctttttttcttgctctgttttttctgattttcccaagaaaaacgacttttattgggtctttaaatgggcctcaacagatttgtttggcccaagggtatctaaatagccatcaacagatttatttggcccaagggtctctaaataggcctcaacatatttcttttgcccaatacaatcatatgctacacatcttcaaatcaaattaaaagtaagttttaattgcctttttttttttttttgtattcaagggctacaccaacatattttttttgtattatgtagtgggtttacgatcatcgtctagatagatatattggatatctcaagatcaactatgcctaagtgtctgctaacaatacatcgctcaagtttgttacgatatatacagcacggatcagattttcaagtgatcttctacttccgcttcagctttagctttggctgcagctttagaattcttttcctttgctcggcgtttggctccaagttcctcaatcctcttcatcccagttttgaacatcatctaaaagctcaggttggcctctcacaaagtactcatgtatattcgcgttgttgacttgactataacgttggtttttattggataattctagaaaatgacatgatttcattacctattctgttgcacctttgtcaatataggagtatctttctgcattgagttttacattttatgaaatgcttgctgggttcttgataactttatgtaatactgtcatattgattatatgttctcctttgttgacatttcaaggacctctctctctctctctttttgtttttctacattttggaacgcatgttactctgcagtctgaaaccatccaagagctgacaacggaaaatgctttgcagcgttgggaatataataccacacatacaagcataagctcagagcaagtctgcaaagaccgccagtttcagggaccgccagtagccgcaaaaggtaaagaccgccagtttcagaggattctgatgcacggatatagtaatattgacgagtaaacgtttgatgtttttatttcttataaggaatcatattataactcgaagcatttttatgtcatgtactcatgttccttgtcactgaagcaccatcgttttgaatcatacttgggatctgaacgctaaatttcgtgaattcatatacgttcctcttgtgttgatgtaaatctgtctttgagagattgatgtttgagaataattaaaataatttcatgaatatttactatttagtgcttttgaattatttgtagcaaatttcttgttttctttgttgcaaataattgcatgtatacttttgaacaaaataaaataaaattgcatggctacttctctttacttatttgaaggttggtgataacaaatcgtcaaaaacagaaaggatgtcacaaagagaggattccgatccatcagagattatcaatacactaacggcaaatacatgctgagtgatccaaggaaaagtataactttgtctgacaccaaaaattccttgaacagaatccacggcattgatactttgataatccatgaaatagattgtagtataaattctatggaaagcattttagactatgtaagagttttgttgttgttgttgttgttgttgttgttgatagactattgatgataataattaatggttcaaatcaaacaccaaaactctgtaagggcaacacaacaaaagacagtggagattcttttactctgactcactctctttattttgatttttgaataacgaaatatttcaaaaatctgagtgcacatgacattgttggtccacatacagtacccacttatgactttatcacaaacataaagaatgggacatcccgtagagtttttgttttcttacgaacttgacattacatttgtcgtaacaataccagaatcgttatggatctttctataccataatactcacaagtttttgtcgatcgaatttgaaccaaaatatccatttgcaatcttttgagattcgtgtacgttttgccaaacagctagctatagtgtccttttcaaactcgagtgtgtgattcaaagcaatgctgtttttataatagagtcatttttcttatagagtcatttgaacataatttcatatgctaaaatatttgtttaatgtacaaaagactacaaaagggggtgggtgggatatgtgcatattaaagatatggggcaaaagtacaaaatctataatttatgcataactcccgaagcagtcaaagcggatcttgaacacttcgcctcccaactcgatcgttaactaatttcttacattgaatctcgttaacaagctaacaaatctcttctttgagttatcctaactatccaattattcaatcctaacttaaaaagtaaacgactaggaccaaaaaaaaaaaaaaaaaaaaaagtctaatcttaacatcagtatgtgatccactaccaaaagcaagtaacatcatcattataaacaacattatcatttcctttctttcttttctaattacaaccttttttgtcgttttatatttttgtcaaatccaagcactgtaaaataataacctttttctttctctatatctaattattacgcagtttgaacatccgattttctatgaaaatcaaatatttttgagaaaaaacgtgaactatataattctttaattctcaaagtaaactataaagaaataaagcaaactaatgaaacagctttttccgtctagacattctcaacgactagctagctagattcagagttaaacctgataacagagagagagagagataccgaatgttcagaaacgattctatctttgtaacagagagacatgccttcaagaccaaatccaacccgaccaaagctattccataacagaacaaaaactctcttcttgattcttacaatttcatcctctcttgtaatcttcttcgcaattctctacttcatctatcacctctggatttctcttctgaaccgttccagaaccatccctttcgacgttgctgctgcatcgccattaaagctccagcttttcacttacaaagagcttaaactagcaacaaacgatttcgacgaatccaatgtgattggtaaaggtggctctggtactgtgttccgaggcattacacgagacggcaagcttttcgcggttaagagactcgataacctctctatacaaacagagaccgagtttcagaacgagttacagattcttggcgggttaaaatcgtcttttttggttacccttttaggttattgcgtcgagaagaatcacaggttcttgatttatgagtatatgccaaacaagagccttcaagagcttctctttaacgaagatggcgattcgtgcttgaattgggaaaggagattcggtatcatcctcgatgtagcgaaagctctcgaatttatgcatttcgggtgtgacccaccagtgattcatggagatatcaagcctagtaatgttcttcttgattctgaatttagggcgaagatttcggattttgggttgtctagggttaaagtggagggaggttatggggttgatttgtttagccaagaactttctgggaattttggaggagagagcactcctcagaccgccattggtactccaacgcatcatgaggttgattttgctcttgctctacaagcttcttcgtcttccaagaacagtagaacaagccgtaacattaaggaaatgagtctgaattcgatgagtttagcaatggatggtgagacaaaaggaaaagaggtttcaaatgatgttgtgttgtcatgtgaggatcatgagtttgatcagggcaaggagatgaatttattgagtccgaattcggttcttgatttggggaaggggtctaagcaatgggggagagattggtggtggaagcaagaagggagtggtgaattgtgtagtaaagattatgttagggaatggatagggagtcagattgacactgctaatccggattgggatgatgacaagaaggtcatcactactcctgagctgggagtttcgactaggacaatcgataaagcagaacatcgagatgagtctggtttgaatgaatctaggtttgacactctggaagagaagtttgcaaaagaagagatcagcgagaggaagaacaaaagatcgaaaaacaagaagaagaagcataggaatatggaggaatggtggaaagaggaagagcatcaagaagagatgaataacaaaaagaagattggagttttgagaatcaagttcaagaatcatttgaaattcccgcattttcgttactgtttccgacaaaagggtgaaaacagcgtgcacgaccgagaaggagaagcagcgggagaatttagcttcagaagaggatggagaaggaaaagcaatagcagcagcaagaagaagaagaagaacaacaatggatcgatggggagtgagatgtggagtggtgatttgttcagccgtgaattaagcagcacgacgagtatgagaggaacattgtgttacatagcaccggaatatggaggcggttgctgttacttgatggagaaaggagatatctacagctttggagtactgattctagtgatagtctcgggtaggaggcctttacacgtccttgcatcgccgatgaagcttgaaaaagcaaatttggtgagctggtgtaggcaactggctcagtcagggaacgttcttgagctggtcgacgagaaattgaaggatgggtataacaaggaagaagcaggattgtgcattaacttggctttggcttgtctgcagaaagctccagagttacggcctgatgttagtgaagttgtgagaatcttgagaggggaaatggacatttcctccactgctttcgagttttctccatcgccaccgggaaaagtttacggcagtagatcgaagcggagaagctaaaacagggcaatgcagagtagtagttcgaggtttgatatgatcttttcattttcgaaattgttggatgtaacttgaaagagttttagcttttgagaattgtattatgttgtaatttttgtaaactatatatataatttaaaatcttatatataaatatttaaactttaaactttttcgattgattaaataattttagataaattgtcttattttcttaactatacctaatatttttgttttttaagtgttaaattttaaatatgtgtaaactaattgattgtccaattatgtttatttagaattttaacacctatttcatttatcgaaaaacgtttttagtttttagtttatactaatttatatatcaatatttaaaaggtttttcgatgttttccatactcttgatggagtaaactgatggttccttgaaatgtggcatgaaaaaattgcaacacataaaagaatccaaggccataacattcatcattggttcacgagtcacagaatacaaaaatattatataagaaaatgaagtccaaggacaaaagaatacagaaaaggacacaaatagactatgagagagctctgaagatcttgccttggaaacacagtgagctcagcctttgcctgttctgcagtctggctcatatcataacacattgaactttaacttcttgtaacttgaacgtgcagcgatgcgtggacgtgtaacaatcaagaatcacactagtttttaacgtctatcatgtaatccggagagagattcctgaatcagcatggctgcaaatgattagttttgcagattcattgatattaggaatatgcaaaggtagcgatcagcaaatctagtaaactgacgaaaagattacctggaaaactgcacggcggatgtagtgaaagagtggagaccgtgaggtttgagaattgagtcattatttcagtgatcgtttgatgagaaacttcaagtcttacccctatctgattattttctgtctactgatcgttgacccttgtagccttcctgagaaccaactttttgaagattcatcctcttgctttttctgacccccttcaccttttgctcctcaagaagtttctggagcataggatttcctacgaacccctttgatttcatctctgaatagatctctctggccttttcaagccacccacatgacaaaaggccctgtattgtagccaagtaaagagcaggattagccactatctcaaaacgatccatttctgcccagatcttcaaagcattttctggttgctttcccttgaacaattttccaagaataagaagaaaggtctcttctgtaggacctaaatcagagatcttcatttggcctaaaacctctaaagttttctcgaaatttacagcctcaaggaatgcatgaaatgtatcaactgttggactaaggttctcactaatcatggttgccaatacattcctggctacgtccagctttccagcctcacaaagggggcgtatcatcgagttgtaggtcactgaatctggctttaatccttcctcgttcaactttttcataagcttcatagcttcatcaaagcaatcctcacgggtcaacacataaaccaaggaattgtaaacttcaatccctggagccaatccccgtttcttcatttcatcgtatagcctgagagaatcaaaaaggttcccaactttagagaagcaagagatcatgtgactgtaagagtccttgttaggcgtgatacagtaattccccatctctcgccaaatcctctttgcttcagtcacatcagtccaaatgttacaccaaccattaagaattacgttgaatccctcaacatccaccggaaagagctttttgcttgcaagcatgaactcttcagctttttcaatgtggccatgtctacacaatgcacatagcaatccttgaaatgcttcatcataaggagtgtgtttaaacttatccataatatcaaatgtccgaatagcttggctagtatcattagcagcagcatatctacatcaacaccgtcaccaagacaaccaattcaatacctagctagtaaatctttcaatttagcacaacaaaagagaaacttttatcaagaagacgaaaccgaacctgtccatcatgagaaacatggcctttctagtatcctttgaaacattaaacatatcacggatcaaacaccaagcaatgttgaacttttgatgattacccaacacccagatcatcaaatcacaagatttctgatcatcacagccgcgtttctctccccatttgaatgctagaaaggcaagcctccattcatctcttaattcccagattaaggagtagaaagaatcatgatttagatcaaatgatgagtcctccagagaagccatggcatccgcctctgactccagctcagagacctgtctgattaaatcaatcagacccttttctaacggagccaatgctgttaagttgatatcaaatgtttcggagatggttttggtggagaagcgattagaagaggcaaaatgtgggagatagcttaaaacttgagaatgcacatgacctgctcgatgaaatgctgaagagaaggaatgattttgggaaactgagctcgaaaacgacgtcgacactgcacgacgtagcagagattgatgctgaacaatccgccattgtggcgttcgcgcgagtttcctaccaatggcaacgatcgcggccatagcgagtgagtgagaaggcttaaattaatacatttcaaacatggtcttaatgggatgaggatatgaagttaatggggtcaaaaacgaatatatagataatatggggtctaatatggtaataaacaaagtaacactaatatgaatgggcctaaatagggcccattttagatttctttaaaagatccgagagagagagggatctaattcctgataaaccctagaagaagaagaagaagaagaagaagaagaagaagaagaagaagaagaagcaaaacctgtggagatcgagatgggaaatgagagcaagagcaatttgggaggaggaggaattagggcaaagatggagcactatgtctacagtggggagaagaagcacgttttggctgggatcgggattatctccatcatcttcggaatcccttggtatctaatgaatcaaggttcgttttctctgggcgatttagattgaaatatataaatagatgtttctctgtagattccgaaatggaagaggatgatgatatcaatagctgaaagatttagaatctaaagtttctaactttatatttcttggcaaatgcaatcaagtggtcgatcaaatagagtttgattatatgataatgatgagtcacaatgtttattctgtttggatcataatagacttgcatgatcacattttttaccaagtttgtttgctttttcccctgatgatcacacatcgattcaattgcataatctcaatggttaaatatcttatttgctatatgtgacatttggtaatattctccttgttttgttcattatataggctaattgtttctcttattggcttttgttgtttggtaaatctggtttgtttcaggatcaaagcatcgttctcaccaagattacttggaaaaagctgataaagctcgaaaagctcgtctctcatcatcttcatcctcggataagtagtcatctccccccacttggatggagactctagtcaactacattttgtgaatggatccatacatcatcgtttccatgtctataaactcagccatgtctgttctagagtgtggttcagttcagatatgtatctttacactctacacttaggtttctttatcgaagatatgtaaatttgcgataagttaaaggattcatcctttacgatactgttgtgtgagctgtgagtttcgactaggacaatccataaagtgaaagatcaagatgagtctggtatggtttgcttaataatctttcagtaacccaaaaaaaaaatacacggggttttatcttgtaaaggtcacaggcgattaatgtatagatttaagcaacataaacagtaaaacaatcgtctacgtgtcagggtagttatgtcttcacagaggcatgagtcttctacgtttgtagtaccagaggaatgccaaaaatacaacaaggccacacactccagtaatggctaaaacccatttgaaagcaccaggcttttcaaagaagtctatctcaaaattcatcccaaagatcccggctacaaccccgaagatggctacaacgaatgtggcagtagttagcagcagctcgaattggatcagctgattccgtacgttatcctgcaaattccagaaattttcagcagattcttaaggttttctaagcaaataagatatctaaaaaagatcaagatttcaaggtataccaattgaatgttgatgaaatcttcggtatcatcgatgtactcctttaactgaagagtaaagagagttgcaggtgattaaaccgcttttaaaagctgttaaaacaagatgatgaatgatcacaaaggcgaggtttttagttaccgaggttagcttgttgagagtgctgtcaatgacaacaaagtatgcttccagcaacatctctagctcctctatattctcggttgcgtcttctgagctcctagcactgtcatgccggctccttacaatgctcaagcttttctcaagtctacgggactcaggaggagaagaaacaggagaaactggcgcagacagagaaaaacaatcatttgttcgataaacaggtaaagattgatcaccatataaagatccttccattctcttcttcttctctgttagatacatttctgccatatccccatcatcgtccattagctgttcaatctcatcccgaaccttctgaactcgtctcgtcaatgctacaagtctgctctttagtctacgagcacgctccaagtttagagtactgatctttgaggtaagctcatccaataatgggtatgcctcaatctctaactctgaagcctacaaagggaaaatctattctcaatgctgagcatactaaataacaataagttgtgaatcaatcactgacctgggaatcaaggaaggtacaagcagcttcaagtgcaacttcaagagccctgaactcgaaaggtaaataatcaggggatgagttctgaagcacattgtctaaactcctactcctcctcctgctcaattcgagactgtcctgattccaaacctcagtaacagaacttgcctttagtctctgctgcagctcaacaacatagcgaagcacatagttgtcaagggaattcaagagcaaaacctcatccgcagtaataatacaacggatctgctctaagttaacaacaatagccttctctctaccaagaatagttgacggatacacaaacaaaggatcaagcagccttaaatcccgtgctggtaaatcacatctacgcatcatagtgaacttatcaacctcaatgacctgagaattggcagaagtatcaacacgaatccacgacttaaggccttgtccacgcttcttgagacccaaaacatcaactccaaggagtggttgtctccctgaaggagaaggacgagagcctgcatcacctctaaggttaatagccgaagcaggtcttggaggaagcaaacgctctttgagttcagacattgttgccaatctccagatactacaaaaccaggtaagtataaggaatgaaatataaaaagaatctcttcaaggtctatttgataaaataaataaaaagtcaagaatagaaatttctccaagcaggatcgtctttcaaataccagaagcgaagtaataaatacagactaatctctctgataaaaaatggaagcttaagaaagcatacatcacaaggaaaagatcagaatactatagagtgtttcatcggtcatatcccacaaaatcagatggatcgtcccaaaacaataaaacagagacaatatataccaaaaaggtcggaaattgtagagaaaatttcaattcacacctccaaattaacaatctccgacaaagtaaccctaaaatctaaattcgaaaggattgcggaagtgacttggccggattccgtcttctagtttggtttgagtgaatgcgaagaagaagcaaaagttagaaccttttttgcgttttggtactttgtagacgaaatcaaattacatgtagtgagtaatgcaaaccgattcttaactaatttatattggttgagactcaaatttaccggtttaacgcaactttcattataaaatgctctagctatctatttcattaatgtttgttcaataatttaatgcatcaattcaattagtattcaattatttgatccaagcgtgacgactaaatgagagaatgatatgtgaaatctgaaatgttataaccggtttaggaattattcatagattgaggagacgaaatcaaaaattattcgagtataggtgacaacaacgtgcgattagaaaaagtaaaaataagggatcattggagaagacaatggatgacgtaagccgatgagaatctgaagatcctctacgacccgagtccattttagatcctaacccggtgacccgtttacctggtttcctctcaccaccaagttttgcttctaaaattttctggtagatctgagtccacaatcatcagaaatcaactttgtgaattgaaggccgatcactcctttgactttgttcttagggttcatcctcaaaggtaatcaatttatatggattacgcaattttcttaacgaaattgattaacttgcaattacctgaacctccaaaatcgtaaattgtagggttctctggtgatttgatgtgccttaaagttatgaattttagatacggagtttgtattattgcctgatttccgatacacatttctgtgtgctttttaaggtgtttaatgagctcttagaagctatgggaatggcgtccatgagctctggtactgaaagccttcgtctttgcgtgtttgacttaagaagaggccaacacgaaggacaggaactggacaagatcttgttcttctatcctcctgatctaaccttctccactcagctatcggttataggtctcagtgaagggcttatcacgttcacgaggttagctactagagattttccttctttacacagatttttcgagttcatggattgattgatgttgtctcatgttcacataaattttgagcgttattagcttttcctgtattgttgggtgttcctgagacgtggtttatggaatataaacacagacttttctccccggaggcagcttgtgaggtaattgaagcagagagacattcccatgttttctatgaggccgagcccgatatctggatggtcatggtacaacattatcaactctttcacttgttttagcaattgatttgcactttgttcatatgcataaaaagaacaaaatttgatttagactttggtagattgtagagaaaaataaggagattgaagctgtatggaggattgatgcattgcggagagtgcttaaggaagtgcactctctctttgttatgtttcaagggtcaattagggcattgcttgagaaagaaccaactggaggacttgtaagatcgcacttgtatccattcatcacagactatttaaatggtaagcaataatcaccaagtctatagcccacaaaatccctgtgtagtagcacttatcaaaagtttttctattttggggcagatcttttcgttgggaaaaaacaacagttaccttccttccgtgacactttgaaagagcgtggaacagttcagatgctaactttagctagagatgcggcacttgaagttcaggtttgtttctctatcagaagatgcgtttcgaaacaaaaaaaaagttcactattttgaatagtattatttagatgtacagtctctcgtcggagtgctagattcatgtgctgggaccgttcgatgccactctgtgattctatttcatgatctactggtgtcaacaactctctcacctgtatgttttcaaatccctcattcgcattaatcatatttgccaagattgttgagtcgttaagattcttaaattatcgtggtctgtgtagactatattgttcactaatactaaaagctttagtctttgtcttctctctctcttctcttttcaggatgataccgtcgacttgtttgcattttctgtcatgagattaaccacaaacgcgctatcatctggcacaagttcctggtcatatctacgcaaaggatccggttcacctcaaatatcttctagatctactacggtgccccctcttggttcaggtggtacattgccttcgggaaatggtagtagcacaggtcgtgttattagacctttgcagcacgataagtggtcgaaggggaaagatgggtttcttgtaactgatatttggggtttagatgccaccccgacaattttgatacagaagacacaggaaagtttttaccttttgacttatcagtacaagagtctcaccttggttcttctcgtgcctatcgctgcaattgttaatggagagctagacatctcattcgtgaagcagcaagttattgaaaacgttagctcatctctgtaaacctgtcttgcttcattgtaaaatcttttcagactccatcccttatcatctctatgcatttttgcaggcatcgaccaaaatcttgaaagtcgaagagaagctatcgaaagggtggggcggtgagaatgcttaccatgtaagcggttaccgttacttactagttgataatgacatggaagtttccagagcttctccaccaggaaaggtagcaacactagcaaaggtgagagagaacttccatcaatcatattcatatactgcgatctcgtgagtagcataagcaagagtgtaacaaaattgtctctgatttcgtaggagtctttgcttgcactaaacaagctaagggaagaagtggatacagaaaaaaaccgctcgaagcaagagaaagacatggaaatatgcattcgagcgaagaacaacacatgggtcatcgcgcgtctaaacagaggtaaagagctttacatggctttagagaaagcaagtgaaactcttcttgatgctacagactctgtccaaagattcagcaacaggtaaaactttttagttactactactactaaagtactaacccatgaattagggtttccaaacaaaaaaaatgaaatgatgttgccaatttcttcaggtactgcagcggggcattccccatggattagattctgcaattgtttgttttgatagaagttgcaaaggaaagtgtttttgaagtgttttgagatatgttttagattttcaattataagatataaaagaaaccgttacaaagaatgagaatttggtgacttttgtatccacaactaaaagtaaacgtggaacttgacccttgacggtttgaataaaaccttcgcttaatctcaaagattagttccaaaatcaggaaagctaaaaacgcttttacacaaaggagagattactttattcacatttaagcaatcattatccgagacaaatttcacttatttacattgttgtgcttttagtctctctctgattgttatttatacacatttggatgatttctttcgaaattaattagtgaaatcattcgtttatcaagcgtaaggattaacgtgagaggagtaatcacgggttcctgctccctcccatcccatccattcttcccacgtgtcgcaatctggatcattcattccgttcaatccctcgtcgtatacatcgaacggctcaaattcctccgtcccttccatctgatttttaatttgcttcaacacaatcttcaaagaaaaaaaaacaaagagatcaattttcattacaaaagcgaatttaaatctgttttaagttaaccaaaaagcatagttagctttcataagcacacgcttacatcgtaagcttcgttaattgtctgaaactgtaccccacaattgcttcctctacaaacatcaggatgatactgcaacaatcaaatcaaaatcgatcagaaagatgtcaaattttaaaaacccagatctaagatgattgagctaaacaaaaggtcaaacctttttagcgagttgtctgaaagctttcttgacctcgtattcagatgaatcgggtcggatcttaagagtcttatacggatccattacagaagatgaagaagaacaaacgacttttgatctgttgagcatcttcgtgttctttcttctgctgttttttaatcgaaacgacgaagatgatgaagaaaacgacgatcctggtagacccgaaaacccgtttcctccgatcgttaaagcaattgtcatattttcttatgccggtggttcacaagatggaatcaaagagaagattatgatttgtaaaagaagactgaaataaaggagagttttttttttgttggtaactcgaagattcaatcaataatggattttaggatttaatggattggataaagagaggaagcgggattatttataaagaaaggaaacggtgactcatctcaaagtgtccttatccataacgctaccgatttccacggccaaattgttttttactatttttacacatacagtagatttataaataaaaaaaaagttatccatcccaacctttttgttgttatgtttaaaaaagtttaatattgttttccaaaaataaaaaaagcatctactttgttcaaagttatctactttattgaggtcttaattctggtatggcttaacaaaatgtgaaagacagaggaaatggttgataggttgttggtacttggcatgtgtttaaagttgtagttaagtacaattcagttttctttactaattaagtatgttttagatactgtgggtagtagattcacgctaaactaagagcacccaaaactttttattttaaaaagtaataaaccattagtacgatttggaaagctttgcaccacagtaatactttgagacaatttgaagaaatagtttttaagatatatgtttttggaattgtgatattttgactttgaaatcagtgagaaagaccgatcataatatccgttcttatccaaaaaacaaaattatttgaagaacaaatatacgaaaaaaagattccttggcaatttgatacttttcaccatttaaaatatctcatgattccaatcagaacacgcaaataaatttggatcacaaaatgtacccaacaaaaatatacatctatggtcctattgatcaaatttatcttaaacagtttaacaattttaatacaaagctattatatagagaacttagctaatttcccataaaaaccatagcaaattatataaaaatgtcttataaaacatttagacaacaacaaacaaaaacatttccgttcacaaaccttccactgtctattctcttgtcatcaggttattgcgtaattgatatgcaagaacagcaccagatgattgctcagtgagttctcaagaaaattcaagttgaaatagccaaaacaagatgtgaaatttcaagaaatttgctggagtctggagacagcaagcaaaacagtcttcatgatcttcttcttcgcttcctcttttctctgtcgctttcatccgaactagaagaagatgatgagcctgactcagattcagactcggaatcagaactgtcagatccagatgatgatcctgattctgattccgcaacttgcttctgccgttgcatgatgaggcttggcatgttcttcagatactctctcagattctctgtgatgcctccaagaccaatggacgtaaagaagttgattgcaaacctcgtgttctttggattatccttagggaatatagattcaagtgattcctgcattgttggatcctgaagcctctcattaagcagcctaatccccaagtgttctgacaattcctgcaaaaaatgcaaaccaaacagtctcaaataccaattttccacaccttaacaaaatttatcagcagagccctaattgtgatgtaacatatccataatttcataattcatatgaaacaagaaattaatcaatcacatgaacatatctccaatcaaattaatgagatgaacagctctgaaattgagtttcatgaaatagtcaaatgagttctgaagattctagttacctggaataggatcttaatgaagatacgagatgaggaagtagtgtcttcctcggttaatcgaatgtaggcaagcacatgccaggggagagcatctgtgcccagtaaatgggcaaaaaacttagccacgttacgcaatttgtttgtctcaagacggtgaatcatggaatactgctgaacaaagcatttctcaaaattctcttgatgaattttgttgatcatacagaaacgctgacccaacaatccatagtaacgcagatatgttctctcctgagagcaacattccaggagcattatgcatagttccatctgcaacattgattggataagaatgtcataagacttctgtacttgcagaaagtcacaaactttaagatggattcatttcaacattaaacaataaaatagaaaagcagaaagcacaggaaaatatagagtatccgaatttggaagaagttacctcttgacctggttcaagcttaattttaagtaatttgtgacctgcttcttcaaaatcaacactggacattatggtcaggtagattgtccttctaagattaacaagattagtctctgtttcgtctcttattctcatttgttcttcatcttcttcatcagactcatcttcctcctcatcgttatcctctgaactagcatcagagccatcttcatcctcagactcttcgtcaccgagtaactctttcttcagcgcctcatatttcttttcgttctccacgaaatcaggatcaggtttgaaaatatcttcagtcagaaaaatgtagaattaagagcagtttcagtacttccaaaataataaccgctctctagagcatggagtaaactttaaaatacaataccaagcttaccaagagcagtttcaggatcaatttcatgatcaagagagagatcatgcgaatatttttcttcaacaagatctagctcaggacgaacggccggatgtccctgaaagtaaaccatcaacaagatttgctatccgtgacaataagcatactgctacatctatcacaacccaaaatatcagattcgaattcaatgtgtcaaggagtaaattacctgaaatttcgccttcctagtagcaaagagactttcaatcaaatactgaactctcttatctatctctccctcgtgcagtataccacgaaacctctcaaaaatccctgtattacaaaaactagaagagcttaaacacgaaaataaaaggaagagccgtggaaatatagagcatgtatgccatgaaaaattgctgaagtccgaaatgaaacagctaagacacacaaccaaatttcaacgttatctttttccaaaagaactagatggatggagtgtaattactagatggattatatcataccaatatatgtcaatagtcattgacttgtgaaagaatttgatggtttgagtgtaattacaaatagtctaatgattcttcaacataacaaaacaagatttctatccaacaaagagagattgaaatgatttttaccattcaatcctcttggtgaaacgtcttgaagcattgcaccacattccgtcacaaacccaacagccacctcaacactgtcatcagttgggtctcccagaagtatggtaactaactcaagtgctatgatctcctcagcgacttgctggtttactagatgcgctataaattttacagcagcaagcaattgaggctgccaaaacaaatatgagacataacaatgtataaatatgatacatataaatcaaaatgcttgacaaaaaatttagattcgaaaagccaaaaaaaaggacaaaccttgtcgttacgcttatacgctctctttagctgcaaaacgacccttttcaatagaagttcagcaacttcagggaatttggcgttaataacagcgactaaagctgcaaagacgtcagtgaatccaggagatgccatttgagacttcatacatgaacggcagaaaagtccccttcctctgatgagattttcagcaaacagttcagggattatgttcttgatgttgcttgcattaaccttattgacgagcccattaatacttttacggagagcatcccatgtaagccgttgatactctacgctgcttttatcttccacctccttcatcatgcgtgctagcttgaacggaggaatataaactcctcctgtttttcccaaggccatagcattgttctcagatggattgagttctgccagcttgggctttggaacctcaatcttcttctcttcccttttcctgctatcttcctttctcaacttgtctctttgactatcatcatatttatcattgtgtctcctttctttttcatctctaactccatcgtccctccgactcctatcttttctttcactttccctacgccgactcccattctcatgcccatcagtcaagtctctctccctccgatccctctttaagagaccttcactacctctatcattcttctcttttcctcttctctcactcctaatctcaccttcctcatcgtcgtcagatgctcgatgatccctgcgtttcctctggctttctcgcctacctcccctgctcctctgcctatcatcttcctcatcagaaggtttatcagctatgactctactacccctatgacttctctctctaccctgtttctccatgactttggggcttcttctccttcctctccgaccgtaatcatcatcaacctccatcggttccttcttattccccttcaaatcatcttcttcatcagaagaagtgtcagctctaactctatccgtatttctccccttattcactctcctctcaccatcaccatcactatctacctcaattcttttacctctatcatcctcagaaccagagttcgcttcttttcgatcctttctcgaccgtctagctaattcctcatcatcagaagtctcttttcttctgaccttatctccacggcgtccctcaccatcagcgacagtaccaccaatctcaagatctcgtcgcgagctcttacggtcctcatcatcagaaaccctaacacgacgagcaacatcatctgtctcagtcctcgatcttctaacatcagggcttctctctcgtcttctcctatcccttcttctaactctctcttcttcgtcggaggaactaccgtgcctacccatggatgagaaagtagtacaaacaacccaaactacgatttacagagtaaaagtaagaaccttttatcgattgatagataaaaatccaccaaggcctatccaaagatctgaaacctgtagcaagaaccctactgagatctggaaaatcggcgagcaaaagtgtgatagactggcgaaacaaaaatctgtgtcgatttgggtttttgttgtagatggcgctctttcgccgacacgatgtcctcttatcgatgctcaaaacgacacaatgtctatatgcttataattttaaatccaaggaaacataaggcccaatgggtcaaggccatttcttcagtcactgtatctcttccaatcatacttttcagactaaaatctgctaactatttgggtgaccagttcttgtaaccagaagaagagtttgtccaaaaaaaaagaaaagaagaagcttaatgggtcaagaggctcaattttgaatgaggatttgtcgtgagcccaagactacatcttatttcaatgggttgggataatatttatcaaattcgaatatttgcaaattgtaagaagaccgacgcacattccaagaattactaacttcaagaaagatgctctgtttcgtggcatatgctcttaccaagttccaaacatttatttttataactccgtattcagtaatttaattctcgtcctaaagacacctaacgctgccccccaaagattatttttactattcagttagtatttggtaaaataatatgtagcttaatatatttttcttggctgcatggaaaatttatttcaagtaaatacaaaaggtcttgactaacacaagaaatgattaaacaaaaataaaggtcttatcaatttgagttcaaaattagtattctgaacaaatcaaatcacattactttgaataagtctcaacggtcattgattatgatattaaaacaaaacaaaaaagtaatcagatgatttatactaattcttttattcaattgatttaaggcaagacttgtgccggaagaatacttgtggaagagacgtatgatcatagtcaataaatcgtttaatgagttatttcccaaaaggaaaaaaaaaaacagtttagaaaaggattaaagatgaattcataaaaaaataaagaaggttaaaggttgcatgaaaatttagcaaaggaataaagagggaaaaggtcccaacctaaagaatacgataagacaactattttcgacttctgattttttttctttttgtaagaataaaaaacattttcacaagcctctgtagctgaagcacaaagcaaaagcatttggtagtcgtaaccaaaacgccaaatcattaccgttcaactgaaatctaacagagagccctcttttcttgggaattcgattccttgtacgttatcttcttcttcttcttctctttctcaaaattcgtgtatcttctgggaaattttcagatttagatggagaaaggggttggatttgagaaagacatgaagacagtcagtgatgggtttgtcggaggttttttccctgtctctaccaccaagatcgcgtggaaatcaagaaaaagatcaggttttttccactgtttcttgttttctcagaccattaaagattctagacctttattagctaccctttctatttctggtctgaaagatttggaattttttttaagcatcaattgttttagctctatgtgaactatttcctcgagatctagacatggagctttagtcttcttctctctgtcttaagcttgtaaaatcaaagactttgtaactttcgttttgatctgatccgtttgcatgtgattttggaactcaaagcattaactattttgatcgcagcattgttgaacctagacaaagcaccggaggctgttacggaggtcacaccagagaagaacgagataacagcaatggataccgagaaagttggggaaccaatgaccacaactcctcttctgtccgagaaaaggaaagctctgttcgagccacttgaacccattacgaacttgaacggaaagcgaccaactgcggctgattcattgttgccaccgccggatttcgagactgcaaactacccaaaaggctggttgatcggtaagaagaggaagcttgtgaatgttgatgtagttgagagcatgcgtagaatagctgtccaagaaatgaacagaaaggtaaaacaaactaaacatgatgcagatttttgctggagtttgatttacggattgtgggattgtgacaggatcgagagatagatgggttaaacgagcagctagaagaggattcacggtgcttagagcatctacagcttcagctgctacaagagagaagcaagagaacagagattgaaagagagaacacaatgttgaaagagcaagttgatatgcttgtgaacatgatacaagaagatgacgaagaaggagctgaagaaccctaagctagttctcatcaaatttatgtctcacctataatagctgtgttctgttttttttattcttttgtagatttgtctcgtccacaaaaaagaagaaaagaaagaagcttaaccatctattatttggttaagctactcttgttcccttgtgtgatagaacaaaacataatcaagaacattatatattctaagttatgagttctcctgcaagatttgaacctggcatttgattgaatcgattatgttcattgaagctcttaggaggaaaaagaaccatttggtgtgtgtgtgtgtgtgtgtatctttcttcagcaagaaacagaggcaaaataaatacaagtttcagaaatgagatgtgttaaatgtatattactaaagttgtgttaaaagtttccttctcctatgaataaatgaaatattcagaccacgaatttcgagtgtccatattagcttttgcaaaacaaacctgcacgaacacgaaagagatgcttcagatttacatgcccaaagtttccatcccagccacagcttctttctgattttttgaaaactcactataacacagtagctaaaaaagacactggtaaaaaggtcgatttgtgtaatcaaacttttggtttttattatcatcacaagaaccattattcaatcaaggtcgtggttgtttttggtaaagactactacattacaaacattgtcaggccagaaaatttcattcttctttctgatggaaatcacgggtttgactaagattaccattgagagttgcgtgatatatccttttgtcgctaagtcccaactccgatagaatcaagttaccctgcaagcaacaagaagaaaaccagagccaaaccttggtaagcaataacacaccctcaaagtatatatacagctctcgttttactgcagttaaatacctcggtggccattaatttccgaacattgctagcataaagtttgggatcgtctttctcttcttgggatgggtagtatacaggtaaccgtatgacttccaagtgatttacgacttgacagagaaggaataaaatgtggcgtgcctaaaaaacaagaaacatgactcttgtaactctactaatgaaaagctgatgttcaaagcatgagataaccgggaattttttaaagatgaatgaatactcaccccggatatggtatcccatgccacactgaagcgctcatacggatattttaatattaccggaagaactggagttccagccaaaaatgcacctgtcttgaatgtaagtaagtagtctccattggtagttgttccttctgtggtgagaccaaataacagttgtaaggaaacaatgatggtttggtcgataaatcgattgtgctagcaatactgaacctggaaaaagcataatagttggagcagatttattgctatgagcttctcgaactctttcatttactgtgcctgtaaagataaaaacagcggttagatataccctacgaagacatatttagagtagcattagagatttacagaggattcggttcatagatttctaactatcagatagataacgcaaagtggtaacaaaggaagttaaagaactagaaaagaatacactagcagaagatttttaagatttctctttctttgtaagcatccataccagatacacccttgaaatcaggcgattttgcttctctttgaacatagacacaaccaaggcatttgctgtcagacaaataagagaggagatataagtttgagatgaacgctacaaacgaataacagaaacaaggacactttgaagttgtgatgagatacaaagattgtttcaagaacttagataagtcattcagaactaacctaatgaggccaacaagaggaagtttgcccactgatctcttcagcatcaaaatcatgagggagaacagacaaataaatgttaatgtcattgccattaaagaatacccaaaatttgaacttcagacagtagtttaacagagctatgatgatatagcctatttctatcaactaaccttggcaacaaaacttggaaaagaagcagacatatgatacaaaatgtccaagtacgaaacatgattggacacaatggctccaggtctttcaggttcctccgtggcggcttcccctttctggtttatctgcagccaaaagacagaacaaatgaagataaaagacaaacgccaacccatcagtgggaagtaaaccttaaatcaatttcagtaaaaaagaggtcccataaggacgatcacaataaatagtacagcaacctaactactcctttgagcaaaatcgtcgtaccaagccaataaattgccccaaaactatatcttcttacaacaaagtctgacactttttaagttccttataactaactatccaaacgtagaagtacctccaacactatcaaatacaaacacaataaacaaacgaaagcaaaaaactttagctggttttgagacttagctaagcttatacctctgtagaagtagttttaggattagaatccatgtctgaatctcgatctggacagctctcgtgaatccaataaaacccaaaaacgaaaagcaaaaccctagagagaaacctcccagaccggacgataacagtccgtttccaaccttccatgtgagcataatcttcctgaaaaacaactccaccttcatcttcctcttcctctggcccacgataaggagcagaaaacagcgtaaataccctacaaatcaagtaatagagaagcaagatgctcatcgagagaagaaaccgcaatggaacaagagtcaccaatgcaaccgccaatttaatattctccgtcatcgggaaaggacccaaacccatcgtcccatacaaatcggtcctcgcgtaaggtgcgaactttttgtctaactcttcaatggcagccgccaaatcggattctgatttcagtaacggccggtcctctttgctcgacggaggattcgaattcgaattcaaatctttgagctctgattccattattgttttcacctaacctaaaaatctaatctttttttggttttttttataaggaagagagagggtttcagatattgaatcacacaaggaagttcgtgttatgttgggatgaagaaatagatcgcggatctgaagaaagtgtcatccttttttcctcgtcgtctctagatttccccgtgaagatttcagctttcgcgcacacgtagattcgccgtaaaaggtaaacatgaaactaaaacaagtgttttaatcctgtggatcaaggtccatggtaactttaatatacgctcttctatcttaaccgtcagatagatcagtcggaacaaaagacggaccacacgattggaattttttattttccagataatatcaatgagattttccttatatttcgtccatcttattttttgaatatatacgtataacgcaatttatatcctaatcaaacaaaggaattttccgtttggataagaaaaaccatctttttcatttttttaacaaaataaatatgtatcttcttggatgataaaaaattcactagtagaatattcaaaaaataagatagaaacatcattgttttctctattaagtgatacaagttcgaatggtaacaatgtatttggttgtataaaaattgtgagttttatgatacagtattgtaactacggtatgcattagaaaaatgtatttgcaagagaagtatggtttttacaaaaataagcactgaaaaaaagttgattggttaaaaaagttgattgaatacaaaattcctattggaataagaattaagaaatttaaaatatttactattttctaatttatttagattaaatataagttagtctcctatatatatatggtatcaagaataacaattcatacacaaatcattatatttttcaaagagcttggacttcaacgactgaaatcgtgtgcattgttccgatcggcgttttccggacgcatattgtcgaaacaaatctatgtaataatttttttttaaaccctaataatctcttgacatctttttatttttattttcttcttctcagaaaatcttgtgctttcatcttagaatcagctacagaatcagacgcttcaaaaatctgagggaatcttccgtgccaatatggagagatcatcatcatcatcatcatcgtcatgtgataaggtaatattgactggatcagcaaattcgccgacgaattagagtggaatctcagagggaatttttttctacgatttgtctaatctgattcgaaattttgtcttgtggtgatgacgatgaaatagaagatgtgtaccttttttgtgtttgggttattgagtctcttctttcgtatcattcactctggttttatgggatcagaagaaattagcgagagtaaaatctgtggacctgcatcatacagaaccatgtaacttgattatggcacttagtccgagtaaggttctgagacatgttatctcattctatgtttacatgcttgttcatcttcaggtttggaatcttggtttaccttacccaacttttacattggccaatgacgataagccctatctaattaccgtctctgatgatcactctgttaaggtctaattctgttcacttctctgttatataatgcatgtctacttgtaactcttatactgtggcgtagattaacctatttgtttgcctaatggtatcatctgatcaggtcaaaaatgttgattggatcagcaaactccctgacgatgtattgctcataatattatcgagactttccacagaagaagccataaggacgagtgttgtgtcgaagcgatgggaacatgtgtggaatcaaatgtctcatctcgtcttcgacatgcggaagaatattatcaattccaacaacacgctcgatggttcgaatccagttgctacattgattactcaggtcccttcttatcagtcaatttcttttctcttattagtttgtatctgcttattcatatcttaaataaatcactttttggtttgtaaaaggttataaacaatcatcgtggacatctagagagctgcgtgatcatccatgtcccatatcaaggtggaaatggaatgctcaattcttggattcgattactgagttgcgtgaaacgcacgaaagttctcacacttagataccattatggtacttgggatcgaaagttcaaaacttttaacttttccccagactccttgtcccatccaagtcttatgtctctctcgctacattcatactttctcgaaagctcacatcccttgagaaactgctcgaatctccggaccctcaaacttttatcaatcgtcgctcccgagattggagtctttaacagggtactcgcatcttgcccttgtcttgaggtgcttgtactaggcatctgctgcttcaaaaaaagtagggttcctttgaagattgagaacaaaaaattaaagctcttgcaagtgtcttctcttgaacgcattgatgccattgaagtgtcaacaactagtctagacattctcgccatcatagatatctgctgtcggagagatgacctttccctccagtccccccaactccaatttaatagaaacttttgggttctagggccttacgtgcctcacatcagctacaacatatcagaggtacatataatgtatatatattgttacacgtttcaaataatgtatttggatacactggaaaaaggaattaaggtatttgattgttttgatgttgagtaggaaaagagcattgggaatgaagaatttgtgaacaccatatatggtgagttgttgagaccgtttgcaaatttgtatgtagccttgtcggtgagtgtagatttaatgaatccgacagaagttgagaggttacgacaagtcttaggtttatggactcgtaaaatactggagctcgagattatatttaaggtatgtgcgtacattcgttcttcttagttgaagactatgactaccgagtcttaatttgctggtatgtgcaggataacaatggtcctagggaagaaaataagtcttgggataagaagttgtgggaggataataataagaaagatccgttccccaatgctaaattccgcgtggatactgtgtggatgtataacttcagcggctcagaggaagagtttgccttgatgacgtgtttgattaggcaagggactgtggtcgagaagatgatgatcaagacgtcaacctttcctgcaaggaagaggttaaagatagaagcggcagtggccaaactacaggcacttcaaactaagcttaccatcaaatgtttctaatcgaatttaattggttcaaaagttcaaatcttttcaatctaaatttgacgaaagtggtttagggtatataacacattaacacttttgatacgaacttctcaattttattttttcttctggtcaaaataatttgcagatattattgggctttagtctcaaagggaaaagttttgggtatctagaaactagattgaagaatgatataaactcacatacacataatctcctatatgattgacaaaaaaaaaaaaatctcctatataatcttctctcagtacagtgttgtttcatccttttggagacgagggtgaggggaagaatgaaaagagtagcgaaggagagacgataagcgacaaggactttgaggttcgtaccatcagcggccgttagcttcaacaagatgaacattcctgccaatataaactgaaatgccaccattgcaactatacccttcatttctccccatatttctctaattcgcccccacagtttctgtttattactttgatacccactcttaaccattaactaccgggtgctcctgggctcagaatcagccttatcatctagccaatgtgtttttgtctttaattctatctgaatacctttttcatcgtggtccacttcaattgtagatagtagtctactacataccatgaacaagttaagttatataagaagatgtaatacatgtttatgaaaccaatgcctaagcaaaggtcttaactcttaaggattacaccttcttattgaatgtgtagaaagaaagaaaaaaagagattatgtgttcaattgtatcaaagggaaaacataatacgaagtgaagacgtaatgcaaaaaataagaagaaagtatttattacaattataatgaatgaactacttccacaagctttcaagagcgtttcactgcgttttatccgcatgtacgaacggtaataatgcattgtactatttgagccaaatgacattgcataacatgcttagtgctattaacttttaatctatactattaattggaaagtattagatgtaaaataactttataaagtgtaaaatattacaagaaatcccattagaaatattaatttgtaaaaataaacaaaagatttcgtttatggttaaattcgacatttacactttgacaaacacgcggatcctgggcattgtttcagatacaaacgcatacccaaatgattggatataaggctaacagatggatctttggcattctttcggataaactcgtggaccctatgattgaatcttaagcttttaataggataccaaattttgcactgcaagattttttgtatctgttacatataaaacaattaccaaaaatattagttatgatttaaagagatttctataatctgtctaacaaattaatctaaatacttgctaagtcaatgtttgaaaatgaatgtacaaataaaagataagaaacttattatttgcacgactgtttttaattaatctaaatactaaaagaaaagataactaactaatctaaatacttgctaatgccaatttaatcagaaaatataaggaacacaatctcatttgaaaagagcatatacgattttcttaactaccaatcatcgatcgcaatattcggtggtctttctccccaaccgattttctggttcaattacaactattggttatagttttggttcaagtttcgtaatagctttttatttttgtattttgggcttccaaaactgggcttttagctctgtaaaaccttttctttcatgctttaaattgaattatcatttaacaaaaataaataaaaacaaattgggccttgacctattcacaaattgggcgtaaacacacatgaaggtatataaatacagaggcgtttgcttttctggccattccacatttttttatatttctctcaaatttgttcaagaatccctttgtttctatccaagaatggacgaatttgaaggattgaagagagaagttgagagacttttggatatggtagattctgagaacagcgattgtgaggaaaaaatagcaatacaagaagaagttggcgatcttccgagtagttctgtggctgtggagtttctcgaagacgagatcgatagaaaggaagaaatccttcttgctgcgagttgcacgctgctgaacgtaagttcttcggttaatctttgattaatatttgactcacttctatcagatatatgtatatatatatttattcagatatattctgttcatcagatgattagcggacttgatcactcctttgatggcaatgaaagagatatgggacgactacaagttgaagaattcagagccgcctgtctcggccacaaagtgttggtgaacgaaacggaggagcaaactttcgagagagcggatttgattagaactctgtggcaaaaaaaaattctcgactctgtgcgtttggcttacttacaaggggaaaaggagatgccgtttcgtccctacgatcaaaccgaattagaggcactcaaaacggactcgggtgagaaggtttacaggcttgttaggaagggctttcgtgaagcgcgagtggctgtgcggacgagtgttgatttcaaaccatgggatcttgaagaaggaagagaatgtactctttccgagttactagatcagcttcaagcgttaatcagggggcgtataagacgtcatgcctgaattcacaggttttattattttataaacagtttaggatttgaaaaagactttcttgatcctctgttctctgatcgaaagtacggtttaggatatgaattacgtttctgtgttggcgaaattcatcgtggttttctttctcttttatgttattaacatgattggaaacaacattttactgtaaaagagtttactatataaacatataactggaatagattcaacaattgaagccatacaacaaaacccaaatcgaaaccgactttgtatcgccagtccatcaaacttgtgctcgccgattttccagatctcagtagggttcttgctactggtttcagatctttggataggcctaggagtacttttatctgttaatcgataaaagtttcttacacttatctcaaattgggccttgtaggggttcgtgatttgcaggtatggaataaggcttgtatgattaaacttatctggttactctttttctaatcaggctctgtgtgggtggcctggtttaagagagttgtcctatccgataatctcagcaacttctggattcaaaaggcaaacaacaaaaattcttggctagcctatccatggattaggattaatctgggtaatggaaaatattgtcagttttggagtgatcattgatgtaaactgggaaaaatgtcgacttaccttcactatttctctgaccaatacactctttttccactcttttttgttatgagaaatgaaaagaagtaggaattgatttcgtctatttgtcgaaaaactgaagttggtaatgattttgattgcagggcagtatgggggtgggatgattcatacatctatgtgggcaatttgtcaaagaagattgatgtgatcaatccaaaactaaagcgaacagtgatggaactgcataaccctctgcagagagctataccatgcaggatccattgccatccttataatgttggaacgcttgcaggatccacagctggaggacaagtctatgtttggacaacaaagtagcatacttgacctatttgaattagcatgagatgttgtgttgttttgttatgttgtacaaagaaatggaagcaagttttaaaaaaaaaaaactgtagctcttatagcttgcaaatccttgtaatctatattaattataaaggtgattcaacaaacaaaagtaaaatgagagaactgcatcaactagtgtatcagttccaaaagaataataacccacagaagggtacattcttcgtcatctaccacctaagtttcccttctaatcatctcagtgaggtccatcacctggtttctgtacattgcccttgtgttctttttctggctgtgatacttcttttggggagagtttagttgattgatcttcttgggttttggttggagcattccctgaaggtttcttggtttccaaaacaatttcttttattgtctcttcgatttttcccagtctctgtctcatctccattagctcttcgtgagacttggttgctgcctctacttgtaatgccttttgttcagcttcttctttctctttcttttcttcttctttccttttcttctctccaagttcctgagaattagtccaatatcatgaggcatatgctaacaatgaccagaatgaagacagaggataaacattaagacatgactgaaacatcatcagaaactcatatcagtttgataatgaacaataaggagaactcacagcatccatgatcttcattttccggcgagcatattgagcaaccagatacacagctgttacaagaaacaatagccatttataaacaagtcacatttgacagaaaacattgaacataacaactaagataacgggagtgaatggcaatacctacagatggcaagcagacgatgatgaattgcaccacatgccaatcaaacctaacacaaagcaaaatccatatgagaacatactacaaacacaaagcagcacaagaactcaacttactatataagagatagtttcagaaagtcaaagagacactcgcagcagaagttgaaaaccagttcacttgtttcagcctaaagaagctcacattccacaattctacaattctgaggttttgtagcctaaaattaacttcaaaatatacaaggtaagtttaaaaaaatagggtctttccatgatttaaggccgatagaagcatgaatcaaacacattatagcatctgataaactaaacaaaggacaagatcagcgaagagtgtgtgcacgcattcgagagtaaaaccctctttaaaccccaaatctccgatagaaattacccaaatttgttcttcttgggtggttcagtgaacaagatcttcgcagcggtcacgaaatcgagcttatcgagtttcttataggtctcatcgtagcgagaaacactagattcagtctcgctgtgatgagcaacgctagattccgtcttctcgagtttattctctccttttgtgcagaaacgtcgggtcctgtaaagcttcaaccgggtcgataatccggaccacgagcctctgccgcgaatcatcttgatctctcccggcgtcagctccaatcactactcgcgcattttccacacaatatgagcgtttcaaaacgcggtcttgaggctaatgttggtctccacgataaccggatacggtacggtctttcactatttgttatgagacaggtattccgaaaggcactctactagcagatttgtggaggcgagggagctggagacttcctcctgcaagatcagaagcacaagtgagctatcacattgaactatccacaattaatctctcagaagaagtacctgattcttaccgttggtggattgatgatcagttcaaggacaagcacacgacagggaaaatatgcttagctttaaaggagaaattactcactgtactgtggtataagattgtttggtgttcaggaggaattcccaaacataagtttcttacttggctattcgtgttgaataggtgtccaaagcgcgaccgattgaacaagtggggtttgcaagtagatccgaagtgtttgctttgtgctactgcagatgaaagtcgtgatcgtctcctttttgactgcccttttagttggacgatttggaatctcatcgctcgtcgttgctcaatcactccactacgatcctggtcggcaacgatacacggtctaactatgttcaattacaactattggttatagttttggttcaagtttcgtaatagctttttatttttgtattttgggcttccaaaactgggcttttagctctttaaaacatttttttttaaactttaaattgaattatcatttaacaaaaataaataaaaacaaattgggccttgacccattctcaaattgggcgtaacacacacgtgaacgtatataaatacagaggcagtggcttttctggccattccgctttcgccattttttttgcatttctctcaaattcattcaagaatccctctgttaatcttagaatccctcttttaatctcaggctctgcaaggtatggatagattgagtgactttgagaggttgacggcagaaattaagtccctgaaggagtctttaaaggagaaaattgataaagttctttcaagaagcgtgaaagaagctagtgaaacctcagaagagaaaaaggaacaaagtgaaatcgcagaagagggaaacgaagatggtgataacgtattggtgtcttctctagaagacgagatcgatagtaaagaagaagaagtgcttgctgcgagttgcaggctgcttaacgtaagcttttactcttaatcttggattaattttactcaattctgtaagatatatatttatttagaattattctgttcatcagatgtttagggaacttgattgcaccttcgatggccctgaaagaagaatgggacgactaaaccttaatgaaattacagaagcatgttcacgccacatagtgacggcgatggaaacggagcaagaaactttaaaccgagcaatttcaataagcaatgcttggaaacaccaagtcagtgctttgttcaatgggggcatagagggggaacaaatcaaaaaggatctacaaagactcaaagcgagctccggtgatgaagtctattggctaatacgaaaggcgtttcgtgaagcgcgagtggctttgaggacgaatgtttatatgaaaccgtggaatcttgaagaaagaagagaagcaacactcatggaactactcggtccgcttccagagatagcccgacggcggcttcagggcaggccacgtcgtgacgactgctgctgagtagagctgggcattctacgtttaggatcgattttttttttttttccttggcttttagtttgttacggagaaatgtaatccgattaacttttttctagggtttggtttgatacggatagatgcaatccgattaactttctagggtttggtttgatgatagatgtaatccgattcttggtaaataaaatcgaaaacgttttctgcctcggcgaaattggttggttttgaatgagaaagactctcgtccgggcgtcaaactggctcttatattctatctctgcaaatttctatcttgtgaaaaccatttcaatttccagaactttttgttcgagagacgatcagtgttttgtggtgtattagatggacatggaccatttggtcatatggtttcgaagaaagcccgagatacattacccttcacagtctctagtctctacccagttgaaaatgacctcagcgtcagaccaaagcagcttagttggtgcattccagagaccaaaaactaagtttcatgaattc

SEQ ID NO: 147 - DNA, 94029 bp, Arabidopsis thaliana
gaattcacaacacttcataccatctgatttcaagacaagatctctttgggaaaactacgtccataataaaagtattttcagagaagaagatggacggtcaagtcaccttcactaacagagagacatgatgtgttaaagtttagtggaagaaggggcttgcacgggtataacaagagaccaataaatggtataactataagtctataaagtgctagataagacgttgaactgcattttatcttatacatggtgggagaaggacttacatctttcttgtcctgaggtgtcaagaaaggatctctcacactcaggccagccgcaacagtcaatatgggatcaaggcaaccaagaatagctcctagtatgagcatttttccaagctttggctccatgggaagcttggacaaataacgacctgcaaagaatatcaacaacatgagataaatttcagtccagctaccaaaactgtcatgattcagcatatttcctctaacctagagtcgtgaggtcttcattctcatccaatgcgccaattatcttcagaaatgcgatggccttttgaacctgcgggcaaaggggaagaaacaaaattactgtatcattgattattataagtttggttcaaatcaaacaccttcacttgagtaatgtttaaaaacagaaaacctaaccaaagaatcaaacaaatatgacgtacggctagtagttcaggagattgcagcgcccttgacaagaactcggatatgcttccgaggtttaagcttttgatttgcaggcacagtgagtgtaaaggcgtccttaaaatttcaggcaactgatattctgcaaaagcatcatatacgcactttgggtaaagatggtaacactgtccaggtcgaacacgaccggctcttcctcttctctgcaatcacaaacagagcatgagaatcaacaataaatatcactaaatgtaagcccacggaccagtcagatagttaagattgttggcagtgaatacttatactcatttttagtagtccagtgtatttgaaatgcaactacgcaaaagacaaagaaagaaaatataatagctagtagattaacgtctatgtaaacagtactactaatccctgtccttgttcctgcgtttcttttattgaaaaaattgactaatggtcattcctattatgaatctagggggaaatggctccgtagtcttattaatagtttgattctcaaaagctaacaactctaacaaactatagcaatacctgctgagctgaaaccttggaaatccaagaaggaagcaaacagggggtattgtttaatgcatcataggaggtctcttttgcctttccacagtcaatgacaaaagcaacatcattgatcgtgatgctcgtttctgcgatattagtggctaggactatctttcttactccacttgcaggttcttcaaatattaacctctgcatttactcaaaataaagtcaacggttaatgataaatatggtatctttcaaatacaggttctggttgcaaagaacggagagggaaaaagagaagaaattggtatcagctcttcaacagatgaactcggttatattcgacggtcattctacaatgcaaactacactagcatgtgttgtcatcaggagaaaaacattataaatcacctgctcaaaagtttccatagaaccatggcaggcaagcaacataaccaaatctgggttgccaaagatcggatgaatctgcagtttttctttcagagagctgatatcatcccacccagtcaaaaaaattaaaataccaccaggaccctcattctcacatatattgcaaaggagaaattctatgaggttaaaaccaatgcaatcaggataccaacaagataaagactctcgagtctcagggctaaactccttgaagtcagctgctctcagtgcgtcctgtttgcataagggaaaaagaaatgaggacctaacatgtagagttaagctgctgatattctttttctagatacctcaacgacaaaggtaatttggctcttccgtttttttgggatctgtttgttcatcttccacgttctttcttgaccataatcatcaatttgattgtatggagtcaatctgtaccgggtcatctccagaatatcctctaggaaatgactacgaactggatatgtaaatccctatagtgaagaagacaatattagtagtttcactggggttaatcagagcatatagatccaaggaatattgaactcagcaaaagattaaatatcttgaaatgttctaaagaggataaacaaatatgtttcttacttactggaatataaatgacacctgccccaccaaagtatgacgagaaaagctccgcatctaaagttgcactcatcaaaatcagcttaagctctgagcgacgagatagcagatccttaagaatgataagaaggaaatctaaaatacaaaagtaatatagtaagacacctaaatcaagttaagctaaaaatgaggagctgcttgatagcaaaagtatacataccttcattcattccacgctcatgaatttcatccacgataacatgagtaactcctcttaaatttctatctaccaacaagcgtctcaacaaaatgcctgtggtgcagaagagtaagcgggtatctcttcctttaacaccttccaatcgaactttatatccaaccttcacaaaaaagtaagaaaaaagcaagagagcttaatcagtaaaaaagagaggaattcaaagtataagaagggtccacgctaactagatataggagcatgcagggtgaaactcacagattcacccaactgctctcctctctcgtaagcaaccctctccgaaacagacatagcagatattctccttggttgagtacatatgatactggaaaaagctccacggtttgcttcaatctcggattctaaaataaactgcgggatttgtgtggtcttgccgcaacctgtttctccagagataacaataacctgcaatacgaaaatttatgtgggtaatcggaactaatacaaaaccaagacgaccgtcaagttgatattcgattttctatttgacacagatgtcacacgactgagctcaagcatgcttccagttatcttctgtgcagacctgattttgtgaaatagctgtcaatactgaatgcctttgcttgaaagcagggagacttgtacgagaatccaacattctttggccttctacggatgcctaatcaatggaacacatcaaaactaaatggacgatgaaaaagcatagatgaagaatatattaaggacctaatataaacagaacctgccaatattgttgtcgatcacgcagctgcaaactcctttgccaaagaattttggtggcagagatgggtagtggttgctcagaaaaccattcatcagtactgctaatgctactagttcttgagacggaattggcagggactctatctatcctattagagcttttactgaggtattctgtgaggtaagcttcaactctttgaagaaggtcagtatgcaaattcacctgtaaatatttttgtatatatctgctctttaaagaaaaacaagccgtcttgcgttaagtgtaagagaagagagtgaggagcagcggataatacctccctctgtggcttcttgtcatctaaatcaaacctatagttggggagtgggatcttactgaagacaacaaccttagcatatgcatgactgcaaaaaagaaacagaaatggttgtactagtgagaaagaagaaagaaaggagcagcatgattgatgtacctatacaatcccagggttgtagccagagcagcaagtttatcaaaatcccgtctatcttttttctccctggaaataacttcttgctttaaagaatctttcaaaagcattgaaaatctcttattccaatcatccaagtcggcacagtgaaaggtaccctcctgctgcaaattgatatggttccagtagaaagataaagggatttttataaaatgctactcgagagcaaatcgaaaactagaatcgccattgtaagagcatcaatcaaaaagctcagagatgcatgaaaaaaagatgaagaagaagttaaccggttggcgatcctcggaaacgcggtcatcataagcggagacatagcgaactggagagagaggaacaggattgaagccgtaatcggaaccaaggcgctggtgaggcggaacgtacagcgaaggaggaagacgattcgtcatcggagccaaattcaaaactctaaactctctctactgtaagtcaaaagtaaactataaagagggagagagatctccgctgcttcttctaacactgaacttgcaactatgccaattttacctaatcgccctccaaaaattttgtaaacttaaaagaagaattacacaatttggttttgcagtcaaacagtaatcagtctttctgagaggaaatatagatttaagaggatgttttcacgttgctcacatacatatatgatatgatcgtgactcgtgactgtctttctttctcagagacaaaacaaaaaagggaaaaaaaaacaaaagacaacaatggtccttaatccttattacgatctctgaaattaacaaatcagtaggtgtaacccttgacaaacattcctttcttggcatcctcgttctctccctcggctgagtatttgccgagctgggccagtgagttggcctttgccctcaccaacagtgccttctgcgaggcctcaatcttctccggcttgccttgccatgttctgagcacggagttctgcagggcacgtgcgtatgagaaggacacatgccatgggtttgggctctggttcatggcgttcaggttcagtgtggcctctgcctctgattgtcctcctgacagaaacatgatccctgggacagccggaggaaccctccttttcagcatggtgagcgtgaaatctgcaacggtctcgggagaggccttgttcttgtgctcagcgcctggggtgaccatgctcggcttcaacagaatgccctcaaacatgacgttgttctgtgccaagtagaagaacacctctgaccacactttctctgccacctccagagtcctctctattgggtggtccccgtccagaaggatctctggctccacaatggggacaagaccattatcctgagagatggctgcatagcgagccagcccccacgcagcttccttcacagccagtgctgaaggaccgcagggaacactcaccactgtcctcctagacaaacacacacaaacatcaaaactaggaagagcattttcacatcaaaccaaagagttaataccatatgtaagataacatggtgaaatatatgacataccacttggcaaaacgagcgccttgcttgtagtactcagcagagcgtgaggccaatccatccaagccttggcaccaagactcttcgttggaaccggctaggggagacaagccctacgcggtggattgcattgtcaacacttcactcaacacacataaaaactcaactacttatgatgatgatgacagaataaatggataaaaaataccttgtcaactttgatgccagggacgatgttggcatcgcgcaagcaatcgacaaaggtcttaccgtccttggtggactggtaaagagtctcctcgaagagaatggaaccagagatgtaatcgccgaggccaggagtggtaagcagaagttgcctgtaggcctgacggttgtcctcggtgttatccaagccgatagaagcaagcctcttcccacaggttgcattggactcatcgatcgccaagatacctctcccaggggatgcaatgcttttctattacgcaataatcagagaatctcactctacgtttgactttgagaattacggaaacgaatccaaactaataaagcatcaaagagagagagaggataaggaggatactcacggcggttttaacaagctcgtcggagtaagcaccggcgcggatcgcgaaggagactcgaggaggaggagaagaagaagcagaggtgtgagcaaaggagcgttggccgatccatggagaagagagggtgttaggcttaacgaagctagcagacgccataggtagtacaaggaaggtacaaaagtgatggtgatcaatctctcggggactccgcgggacagagacagagagagatctgggatttggaggagagtgttaaagccaaaggttttgtttactactattagtagtcgtctactttggcatcacctactcccaccaccaaaaagcctccttctctttaccattttattccccaatttaccgtaaatgacgcttttaaccttgagggagatactggtaattttttctagtagttcatcagtctctcaacaacaagaatctgagaataaccaaaactctaccgtttcgtctacccaaactatccttctcctaccattgcctcttcgtctaactcaatcgtttttcttaattaatcaaattacatgacctatcacctcttcaaggagtgtgatgaaagagaatgggccggatattcccttttttatctgttgggccacaatagtaaacaacttatataacaggcaaactcttttacgtaattgatttttgggcccaatagtaatagggcttagtttcagataaacaataagagcccacgacagctttggtgttcttgggtctttttctttttttttttcctttttattaaggcaaccatccaataagtccaaatattggtgttactcgtaacaggcgaggaaggtgtaaacaagaagagagaaaatgcaagttccgagaaacgttatatatatgcgacatgagaaagtggcaactttttctttcttgtatcttacactacttttttgtatttttaaagtatctttgatttgataacagttttctaaaactgttggccacaatttaaatgcatattcatatgtatgttcaaatttacagcaactcagtttgaccccacaaaaaaagggaaaaacaacaacaaaattcaagactatatgactaaatatgttcaagtgcttcaattatatattaggtacaagaatatgaatataatgccaatcttatcttaatcagagtaggaactagtaattttcatattttaagacaagtttgaaagttgttttaattaaacatgcgtaaagttccattctctgctctcagatgaatggcatatcgatcataattcacctagtacttcttctagagtgttctacgctgcctctacgtattagaatatagtatatgtaaaaggtgttggtgcagatctttgattaacactttggtcagtcacatatctaatgatttttaaacgataaaccccaaaacgcgtcttcatacagttcacatgcatatgtcacccagaagaattgactctcagatctttctaggtgtttgtgttcacacttcgccacgctctctctgttagaaacgatttaaatatacaaacaaagctagtcagtgtttcccattcgaaaaaagagaaaagacaaaagagagtgtgttatttgtcttgtaatgaaacctattgagtatggttgactggttggtgcgtagggagaagcagaaggtgataggaccacgttgttgtttatttggcaattcttttacaagcccttggtcctgttttctccatcttctctacttcatttgtcattttcattgtttacttattaaatttacatccatgttaactattttcatttaaacaacaacgtacgtggacctatcgactgatcatcccttggtcgacaaacaatgatggatcggaacttgatttggttttcttgagttatgtgaaaaagcatcgcattatcaattttaacaacttttctatagctcttaattctgtctagctaatagacctatagtttctaaaacaaatactatagtcttgcaagccgcatgctacctaatgcagtatatatttggataatttcaaattgtctttattatttcctcatatttttatttaattatttagataatttttatttattgttttatgaattttctaaaattttggatttattataattaagacttttgaacttaaaattgtattcagttaattgattaataaaattaagcttttaccttttcagagaagagtattctctaattccttgctttcggtagatcttgaaagatttcaacggttataaaaagatgtaggattcggtattcgaagagaatcaacgaattccttacgttctctcgtttctgttattctgaggaatcaacagatccaaaaaattctagttttctggtattccgaggaatcaacggatgtctagttctatccattaaaacttccgctacttcagttggtatcaaagctagaactagagattcgttgatacacttaacaaacaaacaaaaaaaacttaaaatcaaaatttgacacacacaccaaaatgagttaccttttactcattcatgttcatactatataaaatatattttcgtcgaaacaatcactcctcctaaaatattttaaatttttaatgcaaaaaatattagttgtgttttgtttattttataataaatgatttaatcatataaacaacgaggatcgataagacactcgcatgctatttttaccaggattacattagaatgagagtcacaaccacataatgaagacgatcgtctgctagctatgtgacgagagatggtaagtggtttcagattttatgatgtaaagtggaaggagtggtcaaataattaggtcaaagagagtcgaggtggttgtcactggttggctatatcgatgactaaaccacacacctacaccttcaatttctattttaattatgttttctgaataacttaatactatcttatatgatcgttagtaacaaatatttttttaaaaaaaatttatgtacattcataggtagcacgaagtgaacaaatacttgaattttcttgcgtcaatatagaactaagatcatacatacatgatacataatgaatttatgtttatattagatatgcgtcacaagggagacaagaagcgaagcgaggatcgtgctaaaatcttggtcaagttcacaaattatgaattgctttatatattaaacaatctctcacaaaggatggataatttaattagttggttccctgtcagttgttaattaagaattaatcacaaaccgcccacttcctttttatattccaaaaatgcttctccaatgttctacacttaagtatatcatataattaaatgaaactatgaatgagtaaaataattgaaacatactatttaactagctagctgggggatttgtaaataatataacaaaggtcgacaattgatactttttccatgttgggaaattctgaaaactgatcaatatatatgagtaatcgacaagaaaataactaaaacttagactttgaatggttatagcggtttaagaagacaaaaatgtctatataccaaatcgtgttttatttactatttataaattatattatgtaatagtgcggattccaaaaaataaaaaataaaaattgttgtggactaactacgaaccgtctttaaattaaatttgcagcggattgttgttcgatctaaaattagtatggactgaaccgctaacggattaatctgcactaaccacaacatccattcaaagacttaattatttactatcatgttatatttgtggggcattaataagtgaaacatattaatagtaattaaaatgaatgatatgagccatgatcttaggactaaacattgggcatgctaaattgctaataatatctatcacaagaagaagcgcgacacaaaggaatagatgcgatcatgaaagatcattatgatgattcagtgtttttcttctttaggttctaaagctcaatgattgaaggcctctgtaaaattttgtttggtctttggagatagaaaggagcttagatagagatatgaaatcagcatccaacaacattttagagtcattcaattttgactttagtatctctttccaataaaccgaaaatgtgggtgagaataaagaaaagtgaaatgttttgggtcatattcatcataaaatgcaaatagcggggcgaaaagtatgaagatgggaaaaaacgaaaaggactgaaagtgaaagggcttaaccaaaagcaaaataatgggtcccacaacacgtggcctgtgtcatttcttcttcttctccatccatataaagaagaagaaagagatgagatgcaaggtagtatatgcagcaagaacaacaacaagaaccaaagtaacaaaaacaatctctaaaaccatatcaatgggactacaaggtcagctctccgacgtgtcatcagattcgatcccactgatgctactggctctcctcgcaactttcttcagacacgtccggtctcttctcctcttcccttcttctgcccccgttgttgttgttacttcaaacctcagcgtcctcgccgaccagctcaacctaaatcgcctcttctcgtaccgctactccgacaacgcagcctctgactgcatcgtgtgtctgtctaaactcaagaccggagaagaagtgaggaagctagattgcagacacgtcttccataagcagtgtttggaaggctggcttcaacatctcaacttcaattgcccgctctgtagatctccattgctacctcatcatcatcagggacatggcagtgatgcgtcgatctcagccttccctcttcgctctacctctactgcatcatctcattgatttttatgtgaagaaagaagaaagaagaaagcaagagagaagaagatggagggaggatgcttttttatttatcttccttctcctctttcctttttaggagaagattcttatttcttactacagaagattgattcttcttatatatctatatatataaccttctatatttagctatgtttttgaggaatctcagatcggaagagaggtccttttgtttttcagatttccactctgtaaattcttagtatgaaaagaatcaaattaagcttcatgtattcctccttggctggtaaatctttttgtagtatatttgacaaagcctactactatttaattttgcattctagacaatcttgaagctttacactatggactttgttctggtttccacactttgcattattgctattgacgttaaaaggtaggtaacactatttattgtgtcgaaattctacaagaaaatatcatagcacctcatttggtaacaaactacacttgtattaattttgttattgtaaagactgtctgtgtctaaagtttatcaaaaatatcctatatgtagtaatgtgagttgcaaattcgtccaatcttttagtaactagttgtagctccgctaaatagttttcgttttctatagatccgcccatgataacacccacatttcaacttgaataaagttgtactaagcgatcaatacagtattacaaggtgtttctgaacatatgctcaactaacagttaacacattataatacaatatgaataagactcagttaatcatttaacatttctatttgcgaataagaatatgctctagtttcgtaaacaatgtgtaccatatccttttgaggattgaggtccgttttggcagtattcctaacgaattctaaaatatttagctaattcagataatcaaaatgctggaatagctcagttggttagagcgtgtggctgttaaccacaaggtcggaggttcgacccctccttctagcgattacttttttttttttaactcgtcacgtagtttccttaaatgggcttcgtcgaggcccatgccaacactttgtgttgattattattccattcgctttaaagtttaaagttgtggcgatgaaataaaaatgtgacagatgtgttgttgcttgttgaatgtataaaagggtaaatatcagctagctaacaatggctttactataaatcaacccctgaaacgttgtttcagctaagaatgttggagatgggacccgtaaaccagtggcgggcactgaaaagccaatatgagagggttatggccaccaaaccagcaactgccaccggagtgtagttgagtgtctctgctgttatgggatatgccacgggtaaggagaagaggactgatatggttacaacccacaggactgccacccacccgactaccattccgtattttcccaggctgaatggtccaggtacgaaggtgttgcgcgcaagcgtcactctcaatataatcgggattgcgtatgctatgtacagtccaatcgttgcgatcgacaccattgcttggaacgccactatgctccccagtgactgccagtttcatctcatcaatcagcaatcccaacacacaaaagagagatacacagaaagagagaaggggacttacggtgagggccatacaaaatgatatgagagcagagagccaaaccgcattaatggggacctctctgctgttcactttgtgccataacggcgacattggcatcgctccatctctcgaaaacgcatacgccatcctgattaaccaaacacacatatgatcaagtcctaaatgcagacagaatatgttttaaccaaacatgaatgtatatatatacctggaattgctggtgacagagctcatgccacagaaaaacacagcaaccgcaacaacgcctaagcacacgattccaccagtaccgctcccaaacctattcttgaaagctaagtagaagatctcagcaatggcatacccaccagagttgttggtctcactcagaagagaaggtatgtctgtgacggcatagcttatgcccaatatataaccccatccaaacagaattgatataccaattgcactgattattcctctgggcccgttcttgtctgcgtcgactgtctcttctgtctgcaaatttactttttgttcaatcctcaagaaaagctaatcaatcattaaaaacagaatccattacactcaccatgtgggcagaggcatcataccctgtaatggtgtactggctcatgaggagtcccaaaacgaatatgtaagcgtagctggtgatgccaaggccattatcagtgttgaaattggtaaagacaaacttagtggttgctctttccgtagaaaccaaaggaatcagaatcatgagcaccaaaacccctgaatataagagatgcttgattgatgattgttgttgagacatgacatgaaacacagagacaaaagagagattgggtaccgaggagattccaaagagcagcaagctgtccaatgaaagacaagacggagatggggaggctgttgagaagagcgtggatgaagaggatcccaccatggataccaatcacaacaaagtctgatcctttataaccgccgccgtttctaccgccggtggagagaaggacgatcacctgaatcaactgtgccagagagaagtcaacgctggccgtcactgcccactgcaaacacaccacaaccttacttttagccccaatgagagatatatctaatgaaaacaagtctgcttgaatgaatgttgcacctgaccaacgatgttgaacctgaaaaaagatttgtgaaaatgagtcagagagagacgctctcttgcttccaattccaaattaagaaaaaggtgagagaagggagtaccagccagtcatccaagaggcaagaggagcccaacgagggccagcgagcatagcactccagtagtagagaccaccggaggtagggtaagaggagcagatctcggccatagataacccaacgcacattgtgaaggagccggccaggaaccatccgtagaccagagtgacagtgccgccgaatcttaagccggtgttgtaggtggtggtgataccagtgagcaccgatatgatggagaaggagatggcgaaattggagaagaccctgaaatctaacaattgtttagctaacacaaatcaaagaagaaaaaggaaagagtggcggagacagacgagagatcgcgcttgagctcttgcttgtagccgagctccttgaggcggacttggccggaatccatgacgggaacaaaggattgatcgccgcccaatcccatagtcttcctggcctgagagtccaaagctttggttgttgagagctctctctctgattcagacaagatatttatttttctgttatattactttttacatacccctccaaactgtctttttattattatttattctttaaactaaataaatatgtaattcaagtaatataaaaaaactaataagcaaccccaatggttaagatccttaaggaatccttaagaattttctaatataaattttgacaaatataaagctaaggactagcttagggactctcaaaaatattcatgtccaatagtaggaattcttaagaaagacaaatttgaaaaaatattttggtatttgagtttagattgcttgaaaagaaagatagagaagacaaactatacaaaaaatttgatacatttttgataaacacattttgaataacaaagattcatgacaataaatatgacaaagtatacaagattcatttgaaaacatatcaaagacaaaaactatacaaaaaaacatcatcctcttcttgaagatactcagaacatggcctactctttgatacacaaacctggttaatttgccactgatgaggatgactgtgtagaatgttcaaatcataaaatagacaactttgtggttatgttaccacgatccacaaaatcatgttagtctcgagactaacaatcaaagatttgctatccaaaacaaactaaaaaagatttgatgcaatattgagaggaaaaactgaacctggtttctctgatttgaattccattttatcagactctcatccgtgcaacagaatttataacacattaactaactcttgttaaccactcgtaatgctaaaacattatataaccacaatctttgaactctccttcttcataacattagagagacagagaagattaaagacttgacacaaaagtgtttcagaagaaagaaacaaacaaaccgaagccaaaaatcctctaacatgagacacacaaaacaaatctagtgatgttgttcaacattacataacacatctaaaaatacactaatttcgtagaccacaaacataaatcatatatgctcattgattaagaacaataaatcattatctgaagccttatgcagaagcaagatatttaccttctttgaaaaaggggaccaacaaaccaaacagcagatggatgatcaacgacataatgaaccaagttatcaccggctggtctagcaagggctgcacaagtagccaaagaaccaagaaacccaagtgcccataaagcttgaagagtcctcttaacctccataacatatatacgaattagaaacagagatagccccaaaccactagcaccaacaaagtaaaacaaatcatggttctgcttgattagttcacttaatcaatgatgacaatcaaacattagcatcatcattggtctcttgtgttcccatacatacaacatccgctataatttcagagacacatccaattcagaaatataacctttgttctgattatgatacatcaatcatcaatcggaagaaatcgattgaaccttctcagggagagacagcgcacgactctatgagtaatatacaaaagaaacgattgagaagatttacctggcgacactgagaagagacgatgagggaggtatgtgactatacaagctttcgacaactgccgatggttacatgcgctgctgctccgattacctaccatcaccacttacgaaacttggattgattcaatcgaacaaagaccagtgagatcagaagctaagaccatccccattggttaggtccttaaccatgatccttaacttttttttttttattaaaattttgctttttgtaagttaagaaactaataagagtctttaacaaatttctactccaatggttaagaaacaatgggtccttgagtaaacaaaaatcaaatttttgcaaaataatgtcttccaatacaagcatgaaattcataataacaaagagaagagatgaaatttgaattgctagtatcatcatttgctcaataaaacacaatataacaatacgctagcatgacaaaaacacagttttcagttctgttccaatattttcagaaacagagaaccattttaatatcttgagtgcacaaaagaaacggtttccagttgtgcttcaatattttcagaactgatttaatacctgcagcatagttggcagcgcatgtgcgtaagcacaagtgtcaaactttgttctacactaaaataatagctacccagaaattaaaagaagaagaagaatgagagaaacgaagggagaaatagagagaaagagagattacgcatgtggagagctcgagtaatttagtgttgtggatgattgaaccagctatggctatgctaacaatggctttgccatcttcaaccatcagattataagagaaaatgttaacccaagaatgattacgaattaagaaataactgatttcagtttagatcacaaacatgtaaataccgtgttcactagagccgtattagtctattggacgagattattcgagcgacccaagcctctcggacaccagaaaaacgtcaatttcatgaagagtggatttacaaaaatgtaatggtacaagtagagttttgaatacacatacagtatgtagctacaccattcacaatctcacgacgacggccaaatcaaaatgaaaaaccaaataatgaatcaaataataagagaggaggatcatctgggagcggtggaagtgccagattccatgttttcgagagatgttgaatccatctgcagagacatagccctcaaggcatctccgttttgggaggaggtcacagggactcctcgttcttgagctgccttgaaataggcgtagggaccccatccttcttcgtggtaagggttggggtagaactgacggtagcagaaggcggctacaagggtgccaatgagagctcctgcgaagacatcttgccagtggtgccagtagtcatccacacgagatatccccacaagacaagcggcaagcagagggaagatcacgaggcagagtttcgccacatgtccttcattgttgaaggccttgattttgccagagaggtaaagggaaaggaatgtaagccccgcaaaggaccaggaagtgtgtccgctcgggaagctcttgtggccttccttgacctcagctgccttgccgtggcataccacacctcccaacgcatcatacagctctttgccgtcggggaagcagcgccagtagaagttaggacgagggcgtccggtggctaccttgatggagtcagtgatgacaccagttatcaagacggcgaagagcagcccgaggatgctgtggtgcagatcgtacacacatgtcctcttcaggtagaagcagacgaacactatgatgggaagaagcacagcgtacacagggacagaccagataggtacggtgttgtccttgaaagggtacttgaggtcagtcatcatgtcttttcccacgtagcggtagaaaggagagatgaggttcaagcctatctcgatggcaatcaagatgacgagtatgatccaatcgtgcttgtgtttagaagcgactcttcctccatgggactttatagtgtgaacactaagatctatctcctgcatcctccctctctgcgcctcctggtcctgccaccaaaaacacaaacaatcatcacagtcaactaaaccttcttctaattggatctaaacaaacaaagaatggctctctaagaaatactacttgagggttagggcttgacatctccggtttggatgatagtaacaacggaatgcaattcattctatcggatgaacaaattggtttaggcaaacaaagaactttgtcaaagacacgacaacactttgctctacggatccagacactttttgtctgtctgattcgttatgctaagcacaccactgtttcattaacaatgttttcgttgactctatttaactactttattttcaatgttaggatttttaaaatgataaagaaaaaagggagtagaacagagaatagtcgattgaggttacctgagaattgcgccagaataagagagaagagaaaaacgaccctattgtcatcagaaagtgaagatctcgactaagagatgagatgaggttaaagagaaatgtggatctcgaaacttaggagtaaaacagaggaattgatctaacgaagactatagataaatagtccgatgaggaggaggtagaagacgcgttgttaaacttgcgagttttgttttgtttcccaacttgacggtttgatagaagaataagaagaaaacagagagagacatgattagaaactcctcttcctcttgaattttgacttttgacttttcagttatcgccggtctgatatggccttcgtctttcttctcagccgcgtaggtcccactttttaggaaggttcggaaatccaagcccgtaagtatatttctctgtgggcttaccttacttattaggccttattatgggccttccctgctcgttttgtcagatgatccagttttcaaactacatagggggtttataatttcttttttggacttaactatttactaatatgtatccattacacacatatccagagccagcccatatctaaagcccagcaaatagaatatataactttttagaatacaacaaatttgtgtaaaaataggaaagaatccaaaaatggaacttattgaggaagaaagtggaaactactgtttgtgggtgccaaatagaagatgaagtaagtaagtacataatgaggtcgaaaagtcacaagtctaaagtctttgtctgttttttattttattttggagagtgcatggcaacttgctccgacgtgagagatgcttgaggactcggaacctttctttgtttattgtaaaacgaaatttcagaaagaaaaaaaaagatgatgatgacttggacgttcaaattatcttgcttctattgactgacaattatggttgaactagaataagggtttatggagcacgcaattagaccttttctcatattctttgcatcttttaccaaccaataataatcctacttaaaaactggaatccagatatgtgtagaaagaaaagaaaaaaggtggactactataattgtgtatgggtggaaatggaattgtataccctgagtaggggttagtgggtccagtttggtggtggacttaaaaattggaaacatcttttttcctcacaattacacttttatgtgtgattttttttttttgttaatgatgtgtgatttatttgcctacgcttttgcactcatcaacacaccaattttaatttgatagggcaaaatcatgtcttctttattaaaaaaatagcataacggctttaatttttaaggttttggttttgaatggtaaccacttaacactttaaaacagtataaatagtttgacatttaccaatcacaaaattgttaccaaaagtgttataaaaaattttattctcagctttttttaacagttttttatacagttttttctaacagttttgcactattccgataaaattaatagctaaaaaacttgcacaacttttagttactaataagatttcttttatatattttatggatataaatatatagttttaaagttaaaaagtaaaagaagaaaaaaaagaaggacaatagagagaaagagagaatgtcaataatcaatatacatcttgaatgttttgacgacatcacggtctccaaaaaaagttaccaaaaaccttaaagtaaaaacgaattaatattaattaaattttaaaatgatttaaatattttattgctgatttgttgtttgtttgcttactcttttaggtttccttgtttcacttttgcatttcttgaaacatcatttagttatctcactcggtaatgcacaaacatcatcattacgtctctctatttgctaatttgcatattgatcgtaagaaaaagagagaagatatacaaactcaaaattaatgtttaatacctaattccagatatacacattaacacgtcaattctgtagaatggtctttcgtacaaaagagattctgtttatacattacacaaactttacgcctgtctttccaacagctagatcttcgaatttcattcccaaccataaaatgtagtcaagtcacctcttcttataacttaggtttcatagagttcttattataagggcttttcttgaaatctccttttaatcgtgtttctgtataatatgagatcgacaaacataaaccaaatcacgatcaaacgagaaggttgattatattcatcctaatggtcgaacaaaccccttcgtactcaccaaagttaaataacgttctcggttctcataagaacaatccttctctaacaacattacctgctgatgtatccaagattatgtatgtctcgtacatgttttatagtttactatttattgatcaaacaaaaacatgttgcggaacaatgtcaacttttggaatttccaacctcccatctttgtccaaaacaacctcttttggatgcatcttatcgtgttcctatgtatgaaattaatgaaaacgttagtttttgaaagggacgttacttactttatctcaatttatgcttatctatttttatatctattttttttaaatgtcgtaatctgctacacacaacgaattatataatcggttattgtcatagctatagagttgacccggtggaaaatatagaaaatatgaaaattagtgtaaattaaagtttgactcaagtctaaaacctttttttaaaaaaagataatgggatggaagaaaaaactactctcgattagatcggtaatgtaatggaccatttccaatatttaactttaattttttctatattttagagttgattctattttaaagaaaatatatttagttttgctctattgtatgtttctaaaatagagttaactataaaacataagaaaagtgtaaagattactctatatatagagtaaaaaaaaggaatttctacattttttctctattttagagttaactttattttacagatatacaatgaaacaaaatcaaatatatttcctctaaaatagaggacattataaaattatgcattgaaaatgctctaactatatagttaatgtttttgtattacttgcaagattcgtttgcccctggagacttatttcttgattaatcaacctacacccacccaccaacccaccttctttgatttcaataatatgaatctatgtttcatagcccgacttattgttttcaatattgaaaaactttatccacaagctaccttgtgacctgatcttatcatcctcgtatttattatatttttaagaaatgatgtgatatcattatcattttcataatttaggtcagaatgaaatcgtacttttttttttatgtgggtgcataaataaaaagggctagcaaagtgtaaatgactagaaaggtggtggagtaaagtgcaaaagattaagagtagggttttatcgatgattaacttgttcgttaggtgtaattatcattagactttgcaaaatgcaaactgtaacgaatgcttgcatgagcgccgtctggagctttgacgcgagtcttacccacgaccctttctttgactctccaacagaggtcgaatccaatgcaaaccactagcttcttcatgtctgtggcaatttctttggttgaaaccattaatgtcatcttatgttattcaatttgtaaatattatgatttatgaaggtgttaggcagagggtgaatattaagaacaccttcaatggggatttctaaacaaataataaaaaaattatatgatttaaatcttacatgaatctcttaaatttgatgaaacctaagccaattgtttcttaactaaaagataattagtcttggtttcaccaaatttaagagacccataattaaaaatattatttatctatatttacattttaattttgtttaagaagggtttttaggtaattcttattgcatatgaaagtagaataggaagatagagaataaaaaaaaactcttatctaaaatttatataagagtctaatgagacacatgtctcttttatattggtttatttttttttctaaaaattaaaatttaattatttagtaaattatattaaaataataatatataggtatttagaagaaaaaattaagagtcctccattgaggatgcatccctaatggtagtttctaaacaaaactcttaatatataataaaaaatgtatattatttaaatattagatgggtttcttaaatttgaaaaaacttaattcaattgttttttagttaaaaaacaattgggctaagtttctttaaatttaaaaaatccttcattaaaaattattatttatctatacttatactttaatttattttaaaaaacctatgttaagaaactcccattagaaatattagaaatggtcttaactcttaagcttagaaaactccattgaaaatgttctaaggacttaatttaaaagccatgaaaggtataattccttttgtaactaataaatatagttaaataataccagtagtagtagtacgtgaagagccgtcggatgcaatctgaatcgcaaaataaggaggaatctacggacaggatcacagtggaaagatgatacagagtagagagatttcttcttcttctttggcagattccagcgaggaaccaattagtaggcctgctgtcaaataatgtgacccacaacttctttgattccttaattacaacttttgattagtaacgcttataatgtctcaccttttactaatcaaagtaattacgaatcagctttccataatcatatcatcgtccaattttattcattactttgctttaggaaactctattcatcttattcctttctaaattgttgattaaagtgatttgaaaaggtaataatctcgtgcatttgttgctaatgtgccaaaatatatttgttttggggttattcaccattttcatgtgaccttgttgtatgttataacttataaccgttgggttttttttataactctttttggtaatattatatatttatatatattaatatacagtagtagtagaaaactaaattatcatcagtttgttgcttttctttaacaaaataaccaattaactaattaaattatattaacattgtttgactgtttgtagtgggtatactagtttactaaataaaatatttttgtcaccagccgtactacaatagcctaatgatacgttaaatttaatcatatttgcgatcattatattgtgagtttttacattctaactaataacaaaaaaatactacctttgtattaaaaggtaggatgttttagctaaaatgcatacacttgaaaaaaataaattgtttttgaaaagaagtattaaataatttaattcaaaaaaattcagccaatgatataaaggctgcataatacaaatggtcataaaatatcaaaatatttaaaatttgcataaaaattggtaaaaagtatatattattttaaaatttttctaaaacatcttataatttgatataagggaagtagtgtttatggaaaatcccgacatatatgtaaccacatttatggaatctccgtctctcaatttccagttagctcacatacacaaattgtatttactcgttgacaaacggtttatatagttgataatgcattagatgtatccataagaaagtcgacaaaataacattgaggcgatcattatagtgtgagtttttatttcctaactaataacaaaaattttaagatagtgataaatcttactctctttgtattaaaatatttttttaaaaaataattatttaatatttaattcaagaaaatttgtcaatgatataaaagattgcataataaaaatgatcataaaatatcaaatgtatttaaaaatttgtaaaacatgatatatattttaaaaaaaaatcctaaaacatcgtatattttgatataaaggaagtaatgtctatgaaaaatcccgacacgtatgtaacaacatttttgagaactcggtctctcgattcgcagttaactcgcatacacaatttatacttactgcttgacggatggtttatatagttgatcatacatacatccatttgaaagagcatgttggtcttaattgcatcaaacattcttatcaacacaaaatgatatacatggcatcagataaaccatcacgaacaaatacaattttgaaaggtaatacacacaaattcactaacactattaaggtaatacacacaaacattcttatcaatttcatgattttctattaaaatgtcattataaaaaaaaaaaaactgaaagaaattggactgaaagagaaataaatttaaccataattgtttggtaaaaatagtaaaatatgccaaaaatgagatttaagaggaaaataaaaagaagaaaaaaaaaacagctgtagtctacatttacatacaagtcgtggactaacagctatactactactaagtactaactctttctctctctaaatatcaaattcaatttaatttttcttctgcaaatggaaccaccgccttcttctctgtcctccaccgcggtggcttccacctccatctccgccgccactgctcctgttcctcctcctctacctcctcacgtgacttcttcttaccccgaatctctcgactcctcccctcgttctcgcaccaccgatggctgggatgaccttcctgctccttctggcggcggcggtggcggtggtggtagcgccgtctcttctaaacttcgttttatgtgtagctacggcggtcatatccttcctcgccctcacgataagtctctctgctacatgggcggtgacactcgcatcgttgtcgtcgaccgtaactcctctctcccttctctcatcgctcgtctctccaacacgcttctcgacggtcgttccttcaccctcaagtaccagttacctagcgaagaccttgactctctcatctccgtcactaccgacgaagatctcgacaacatgatcgaagagtatgaccgtaccatttccgcttccaattccaccaaaccttcgcgtctccggttgtttctattcacctccaagcctgaggctactcaatctatgggtcagatccttgagagctctgccaagagcgacgattggttcctcaacgcactcaatagcgccggtcttctcaatcgaggattctcagattctgatactaacgtcaatcgtttacttggtttggatgatgctcttgctctccgttctaattccggtgacaacaacaatcgagatggtgatgatggctctgttaaaagcgccaagcaacagcaacctccaccgccgcagcagcaagaacaacagcaaggaggccaagatgtgaactgcttaccggattctccgatgttagatacatcctcttctttcggctccacttcttcgtctccctcgctcgccaatttgcctccgatccgtgtccatgtagaggaaccaggcggagtaaggactttgccagatcagagaaatctgggaattgaagaacagttcgcacgattcaacgtcgggaacaagcatcagctacatgacgacggatttgctgcgatctcttcaccaccgccgatgcctgtcacaatcgcccttcctgctgcgcctgtgactgcagccaccgtctctaatgagttccaggccagggtttactcagatgacgagagatccgatcacggcgtgcaggctggatacaggaagcctccgactccgcgatcgcagccgcagaatctaccgcctcagcaggctcatcagctgaaatcaaatagcggtggtggacacgagctgccatcacccaattccgtttccaggtactctttcttcttatattggaaccctcatgagccttaatttgatgctatagaagaactaagattggtcagaactctgattgtgtgtttgctatataatgaatgcctcagtgatagcagtatgagcaacccaatgtttcaccaaagaccatctgtctatcaagaaccaattgctcagataccttctggctctaccgttgttactggtatgatcaatccctcagatccaagcacacttttgtcacagcatcagaatcaggacccagcctatatccttcacccccagtttgagcaacaatctgcacaatctcagccacagcagcagttcatacacactgctgctcctcctcaatacattcatcaccatccgtctagcggccttcctgtcccgacttacatccaggtttacccttcgcaacagcctcaacagtccttccatcaacacgcaggtcgactggatcagcagccttatcctgtttattatgtcactgctcctgtcccacctaggccctacagtatgcctgtgccacaatctccaagtgtgagcgatgctgcagggtctatcccctctaaccatcccaactctaccatgatgcctccacctcctaacaaccacatgagaagtgttagcagtggcaaacctgagatgggacaggctggggtttacacaacagccccaggtgtgggcggtgctcagatggttcaccagattcccacaaaccagcagcaattcatggggtattcgcagatccgtcaccctcctcagtctggttcagctgggaatccaaactatggatatgaatatgtcgacaatgctcatacacagatatactacactcaacctatgggacatgcacagtaccagacaatgactgggcctccacctgccatggtgatgcctgatggttctgctgctgctaagcttccagctgagaacatgactcaacagatccggagttcacagccattgtgacacacacaaggaacacatgaagatgaaccacaaaattttggaggaagaaaaccccgggttggtttttaaacgtataaatatataacttttacttcttttttcttctcttcttttacaagttgctgcatcaaaaaaagagtctggtgtcatgttaagtttggtattatgggttgtgtttaaaagtgttgtgtgagtaaattaaaaaaacaaataaatagtgcttcttggtgggattttacattatatagttgcaattgatacatgtagtgctttaccattttcctggatcttatatcatattattatcattcatttcattttgtaaatgtatcacttttttgatcatcatctctctatcttgttttttcaagagactttgaaggctataatattgttcagaaagattctgaaatgttatgtataacatttaatatttggaagaatgtatgtctggcttcttgctatccatgggagcataggtacagatattaaaacatgtgtgtggtcttgcaaaagtacacacaaaccctacaacttctaagagacaaggtgtgggtgaaaaaggtagtgacaaaatcgatctgtcttgcaatttagcaacacaactatctcttttgaaagagataggcatttgtatctttacctaaacaccaaacccagtcctttttatctctctctctatacatgactcaaagatattttactcttgcactacactattctctcataagcaacacagagcctcactttgaatcgagttgtcaatagtcccagataatatttctgcagtgttcacagagttgagatgtgactttgtgcatcagaagcattggcagacctggttggattacaagatctgaaccaaatctctctctgtggtcagctccccatcccttgcttcaaaccaactggatcttaatgggtttttcttgtcttatgtctctttcatgtctgcaattctgtctttttttctttaactcttctgacactcttttagcatcagctcatactataaatctttagaagtgagctctctttttctcatctcactttcccttctctgcatctttagaaataaaaaagcatcaatggacccaaacacacctgcagacttcttcaaaggttcttccaagtttcatacatattactcacagaccaaaaagggtggtggggtaatcgatctaggcctcagccttaggaccatacaacatgaaacttacctcccaccggcgcgaagtgagttttttttttttgctgaatagccgtgctttcacctcatcattagttagttttcttaatcctcaacttgctaccttcaatatctatatgtgaatcaaagtgataggtctcgacgggtatggagagctcatagactggtcgcagcccagctataacagcattacacagttgaagagtgaggacactggacaccaaagacttgcccaaggatattacaataatgaaggagagagcagaggaaaatatgcttacgtaaaggtaaatctggatggcctagtggtagggcgcaaggtttgccttgttgatcaaggagcttacgcaactcttgctcttcagctcaatgatatgtttggtaagccgtgttctgacccccaagcttccagctacaagtatgtttcagaaggttttgccacattaattcgaatctgcagggatgcagaccgtgtcgggattgaggttgttccagactgagtctgagttctctttggtctacagagacagagaaggcatttggaggaatgttggggatgttccatggaagtaagctcttacattttctctatacaaaaactaagcattttaagttaaccactttgtaatttgtctgaaacctgtagggagtttgtcgaaagcgtggatcggatgcgaatcgcaagaagaaacgatgctcttcttcccttttaagcttttaagtccaagcttcttctggggcgttcactgattatctaagatccaaattagctcacttgtggttctattgttcaatatctgatgtaatggaagctttaagctataaatacgattatgaagagagggacatcttaataaccaaccaccaacaagactgggacaaataaaagaacaaaataaaacaaaacaaacggtaaccacattagtgtcatcaggcttatgcttcaaaatacattgcagcttcaaatttcaaaacaagctttatgtgcaatctctagatgtctcaatcgccggccacgggtaatctgtcgagcgtatcagaaacgtgcctcatggtaggccttttctctggactgctattcacgcaactgattgcaatcttaagaacagcaacaatctcgtcttccgtctctgcctcaggagccaaacaaggatcaagaacatcacacaatggtttcttctcctcaatgcatacctgtacccaccgcactagatccatttccgatgtccccacctccactgcgggagacctacccgctatcaattccagtaaaatgatcccataagagtaaacatcccacttctgtgaaggttttaccatcttgagagtctcaggtgcttgatagtaggatccagaagaagagtgagcagtgaactccgaagatacgctcttgtgatggtgttgttgcctctcttgcggctgttgatccgtttggatgattctgttagactgtatggtcggagaagatcctccagcgatgttagctaaccgtgctagtccaaaatctgagatcttaggttccatgtcctgtccaatgagaatgttgcttggcttgagatctccatggacgtatttcttgggactaaactcatgcagataaacaagccctgtagcaatccctttcattatcctcaaccgttcagaccatgtcaacggagcgatggtcatcatccccggctttcctgcacatacacacacacacatttacgatgatgtaactgaataatgcatcttgaaatgagaaaagagtgactcaccgtggagggcggttgcgaggttaccgttggaaacatagtcgtagatgagaagcttttcatcgacagaccaataataagctcgaagactagcaatgttaggatgttttagtttccctatggcttcaacttctgtctgaaactccttgaatctctgagaccctccttcacccaatctccgtacggccagtgtgagcccgttctctagaaccactttgtagacaattccgattccgctcttccccagaacgaaagctgacgcctttagcagctcctccaggttaaacgcaacctgagcgtcgaggggaacaatgtcgcaatgctccacgttttcagatggcgtttcggattcgtctttacggaaacacagacactcagaagcccttttcttggattctttctcgactccgaattggttctcgcggttacaagcgcagaactttgagtagcagtaagtgaaaagcaaacccacaaggcagataccaaacacgtcgcagagaacaatggcaatgacggcgcttttgctcaaaccacttgatttctgtttggtttcagagttagtactatcagaatcctcaggtgggttgttgcttgggataaaagggtaagaggcattgaggccaagttgatatccttggcaaaggtccttcaatggaggcccgcatagaccagtgttgccgataaacgctgttggtcctctgttcataagagcaccggtttgaggaatgggaccggagagattattgaaagtgagatcaatgtaaaccttttcaggaagatctccaagggcaggtgggattgagccggtgaagtgattatgagagaaatcagcagttccttgaaggttggagaggtttccaatgtcgctggggatggagccgttgaattggttgaaggcgaggtcgagtttctccagagagacgaacgctgagccaaacccatcaggcaaaggaccagacaagttgtttctgctgacatcgagtgttttaagtctgttgcattgcagaatcgaaagtggtaacgacccgttgaagagattctgtgacaaatctaaggtctgaagaagcttcagcttaccgatctcttccgacaatgacccatcaaaggaattgccgtaaaggactagactttggagtccctgaagatggaaaagctgaataggcaacgacccataaaacctattgctccggagattcaagtgacggagactggagagaaaccctagagacgaagggagagaaccgtaaagattcttccttggaatgcttagagacaccaccctgagttctttgcaagttacaccgttccacgaacaggcgttctcgtctgatgagttccaattgttaagagaacctgtaggatcatcgtgaacgctttgtttaaacgttaagagcgcaaagccttcgtcgtttaagccacttatgacagtcacattgcagagaagagcaacgaagatgatcagcgaggccaacattatcagatgcaaattagaacaaaaagacgagtgttggctttgtacaaagcaaagagagatagtagcaagaagagtgtgatattgatggagtgaagagtaaagtgaaaaagatactctcgttgaagaaaaaggagaaagaaagaatacaaaaagtagagagaaagagagagagagctctgtttttgcattgggagaagagaattaacaaaaaaaaaagaaatgaccaaagaaagaggtgaaagttggagaaaagagaaggccatggcgaagtaatccatacgctaatttgaccactaatctaatgggtttgaatggtaacaaacttaagctttatacagttttgaatcgatcataaaaactttattaaaagtgttacaaaaagttttacttttagcttttttgtacagcttttttatacagcttcttctaacagttttgcactattccgataaagctaatagcttcagctaacaggtaaaaaacttgtccagcttttggttaccaatcagacccaatatctttgtaatctctcctatatacaaaatgttacaaatgcagatatctttattcaaatagttacatcttgtaataccttttgtcatgattgttgttttattccgaaaagtaatatattggggtcctttgattgatctgtcaagtgtcaatgtaggtaacatttacagtgtttgtccttttctattaatctatcttgtcaatatattactactacagtagtatcattcattttttatttcttagatgatgttgctctagcacgaaactccataaaataccaagtgatgcatattaatagagtgtagcaagtgtagtaacaagtagtaacaagtgtagtttcaaatgagcattgaacaaactagttacgattgggagagagcaaacataacagtggagtttactagagaagaaaggtgccacaagataccaccacgctcttcctgctttctttattcctcgagtctgcttttacagtactagtactacctcttttatatcttactttaccatataaatcacagctcatctttcttattttacttagaatagtagcttgacatgttttttcgcaagaagaagattcatataataaacgattataaatgtggtttagatttagctaaagccttaaaagggtaaaaggagaggacatgtgtacaaacattagtccggcccttattgtcgttatggtgatacgataaaattgtcgataagtagacttggtgaagtgtgatgtctcctagtttcttaggatagagagccccaaaaaaacctaaacctaaacccagagagagtgtgccagagtgggcctattttctcctcacggactaacggcgacgactccgaggctacatactagtaaatcaaacaacttgggttttagtgcaatataaaattattttgggcataaattgtaattatggaaacgtttgggcatgaattgttattacggaaactgttggggataaattgaaattacggaaactttggggggcttaatttggctttttgctggcacggcaatgggaggagacgaaaccgagagaaacaatgggagacgctgcgatccgtaccgtcgtcgaagccattcactcatctccgacgcaggccgtcgtctatctttgcggcggtgcctctctggtttcactctctctctttatgattgattcgtatatacacaagtatgtgattgctctgtgcttttgagtgatcgaaattgaattctctttcaggctttaggttggttgatgtcggttcctggagcgtcgaacacgcttctcgagtccgtggttccttattcgagagtatctatggttcaattactcggcagggtttgttcataaacctctcaatttcattatagcaatcgatgtttctcttctctccattaatcagctgattttcgttcgctctcttttaggttccgagccaacactgtagccaagcattggccaaggagatggccttgttagcctacaatcgggcgcttaagctctctaaaccaggtacttgctctctttcttcacttcaccatcctttgttagcaagaagtcctggaatatagtaatgtggattggtgtaacttccttaatcttgtggataggatatccggttctcggtgtcgggtttacgggatcattggtaacttctcgtcctaagcgtggagatcacaggttatgcaattttgtttcctgctctttatagtaatatacttgtttgcttgaaatgaaagctatcacaataagctagttctctagcatggccctttattctttctgtcactcatagtttttgtttgttgcgcgagagtataggttctttttgtctatgagagcatccgaccggattttggaatcttcagtcactctaactaaggtgattgctgcaaccttctctctcccatattgctttactcttttctatcaactactcaatgtatgttattcttattgtggaaaactttagaacttacggagccgagaagaagaagataaggtgtcaagctgtgcactgatccaggtgtgttactaagctaattacaacctggtactaatctgcctaggccattgctatctgattttcctttctctagttttgttaggaatagtgacaagttagtttggttactggtattacaaacaagtacctgcagacatttctttttcataattttgtattatttagactatatattcttctaggccagttttaatccaaaatttccacattctccaaacgcattgttttctgaggttcatcatggactgagttgttaaaaccttttctggtcattatcttaggctatggccaaggcatgccaagtttctgggacacttgactctggcttgaccgagtctgaggtgccttatgagtctgaaacccactttactgaagaacaagaactagagcagcttataaatgggcacttgtgctgtaagatttatccattttctgggggtaagattttggtcatttgtcccaatgaaactttagaattttttttttcaaacttcatctggcatttgttgccactaatgatgtagttctaactttgtggcagaagcacacgggtctgatgaagacagaaagattatactacctggctcttttaacccattacatgaaggtcatctcaagctgttagaagttgctatgaggtaagctagtatttgcttaacgataacgagtacctgtttctctttcgggtgaacatgtttaaaagaataaccgttgttaatgtcaatcattatgtataacctgagtcttctgtgtcttttgactcttcgctgtctctatgtttcttagttaaatctgatatgctatattatgcaagagtagtaattgataatatctttcgttgtggccacatgttgtgactgtatgaattgattccgttgttggattttggagaggcctctggcattttgacaattttactatctccaaacaacaaatcagataactgttctttttctctggaaaataaaatagaaacaatctcacaagcagatttgttgatgcagtgtttgtgggggcggctacccatgttttgaaatatccgcaataaatgccgacaaaccaccgcttacaattgcacagattaaagatcgtgtcaagcaatttgaagtagttggtaggccggatctttatttttcactatctatttatcttttcaatcttgtgcaccacttttttggtatctctatgatccaattgtttccaactagagaaagaccaatcagttttatgatccagagtcgagctataattgtttccaatgcatttattttgtctatatgcttgtgccatgatttgatattggtttagtatccggttggcaggaaagacgataatagtttcaaatcagccatacttctacaagaaagctgaactcttcccaggaagcagttttgtaattggcgctgacactgcagcgaggcttgtcaatgtatgtaaaaactgaaccgttccctgatcctcttttttttttttttttttccttacagttatatttatacactacctgttgtggtgagcgacctgaaacttagtaagacatttgaagtgctctatatcttcctgttccacactatcaaagaagattaagaaactgaatttcttgcagccaaagtactatgaaggaagcatcaaaaggatgttggagatacttggtgattgcaaacggacaggttgcactttccttgttggtggccgcaatgtagatggtgtatttaaggtttgacctaagcactagaatctagagcaatacaaatttagtccctttgagagttgtctatgagattgtatgcctaatgccttatccttgctcctctgcaggttcttgaagatgttgatattccagaggaaataatcgacatgtttatttcaattccagcagatatattccggatggatatatcctctacagagataagaaaaaaacaagggggtggtacgaactaatgacttctcaacccgcttgaaagtcttggctcgcaagacaatttatttagtgcagttactttttgatttgatatgtattgtgttgcattctgttcttattatggaatccggatcaatggtatgagcatttgcacatgacatcgaaagagcattgcagagttgcatgggaaacgtttaaagagtgcgaatatttgtgaattgtgacagagaagccttgttaaatatttatgaatgtgagctgattagaatctgtaatcatattaccagggctctacctataagtagggttagtgaaaatcttgtaatagtagtaccgaatgatcaaattgtgctggttatttcacaggtctctgcaaatataacagtttaagcttcatgtacgaaaatgctatcagcgctaatgaatattaaagcattacattgtgctcttattgggcttttccaatatatgtaggcctataatcgtttggaaactaatctcaatggatacttggaaaatataaaagtcggcccaaaagtgaagcgcgtgattttttaactgcaaaacgcaagtcgtttaccgaccctcagattgagcgcgtcgacgccacctccccgaaatctgtgggcacccatgcagaaatttgccgtttttcgtaaaattctaaaagtgggcgcgtgtgggtcgttttagtttgaggcaaggaaaaaagaagaagtaaacttgcatttatcaactacatatacttttttggtaaggattttgagagattttgagacaaaaatcttaaaatagtatttagcttttattttctacaaaatctttttaagacaattattgttctagatttatatctttaagtaaattttatctttatttaactatattcaattaattgctaatttcctaaaatctttttatatacattatatataaatgtatgatttttctttcacttttatttgttctgatctctaatttattttgatttttatataaaatacatatagttaataaaatattaaatttattgcggcatatgtaatttaaattttttaaaacaaacatatattacttaatcgatgaaaaagtgtataaggtctcatattgcttaaaacattgtgcaataaattatattcatactattaaaaagatcaaaataattttgaatacgaattagcaggaagcttgatttatcagaaatccaaaattaaaatgttattcggtttagtccggttctttattttaaaaaataaaatcattaaaaattcaaaagattacaaatatttaaattttattaaatattaaaaatttaagacttttaaaaagttagactttataaaacattttaaatatttctaattttatgaagatttaaatattgaactttataagaagtttaaatattaaaaatacttaaaaatatattaatatgagacggtattctacaaatgaaatcttagatataacaatcaaaataaaattataaagtttggatcgatattaaaacttttttttaagtttcaaatattactttataagaaaataaaaaataatgtttaatttcaagatatggggttatatggtgggacatgtttgagttgatattaatacgagatggtatactatgggcggaatcctagaattaacaatcaaaatataattatacaattttaaaaactaaacaaaaataacaatattaacaaaacaaaaataaattaaaacttcaaattttttagttataaaaattattccaagttgtatcatacatagaaaaaaataatagcatataactatagatcatctttaaaacaaaattttaatttttgttgataaaaatatatgtccgtgatatactttttattatgttatttatatataaataatattaattaaaataatttttttaactttctcacaaaaatatcaatctacggtgtattgtagatcaatctctagtgtgttattattgtcagggttgtctgatagtctccctccaactatatactgaatgttatatatagtcttcttcatattgtcttttcctatgtgactaccattttttttggtgttacttttttgtttcaatccagtaataaagaggaatcaaacttaatcaatcaatgtaagaactgcatacatctgaatatctgattatgtagctctatactttttacacggaattttactactaggaatatgataatagcatatagaggttggttggctttcagtccggtcatgaactactccaccttgggggccctaggaattttagagacaacttgtttgaatacttcaagtaaattgttcttctcttctgatactttccccatgaaactgtcaatgagctcttgaaattgcatgtaaacaaccgggattgtcatcgagcaaaccaagcctgcaaggatgtgcatggttataataatagttattagaaacaaatagaaggacgacataaaaagacaaggagatcgataacaggtcatgagttatatatatgtggtcttacatatatacaaaattgtgaggaggctgatgtagctcccaatgttgtatatgatggccacataaaggatggtctgccacatgaatttttatataaatgaatctttaaacttgtatatggaaactagaaagttatgatgtcgactagtgaagattcacacctttagaaatgttttgttgtctttcccatatgcaatctcatagagcatgaggagatgcccctccatcattgaaaacaaggctttaagtggggaatctggttgatttaactcttctggagttggaggtctcctgtgtaagatcacataattggtgaaacgttaagtaagagctagctctatctactgttatattgtaaagacgtgtgtatttggtaggtaccgagtgaaaaagacttctccgaacttggcccaaaggaagagaatgagcatgaggagtaacaagattgagcagagaagcggaactaatcgagcttccatgaactccaagaggaaccagaagagtgtggccattacaagtgttatccctgagtttatcttgtccttccacagacatagatctgccactacaacaacattcccaattggttattaatcgtaaggtaaagccggttagtctcttctttgaatagattttgttttcctctacaagaatgtcaggtcttaatcatattctactaagtgaaaggattgtgcatggattcatatttaaaaatgataagtatttgataatgatgtaacctgctccatcgccaagtatttgatccacaagagacattttggttgtgttgtgataattccttaattcttaaaggagacctgcaatataatctccatagaccatactcaatcgggattttataattaaaataaatcaccatttaatttgatctcttcttaactttttttttgttggcatgctttttagtcttaactcttaattaaaaacaataaccattgtttaatttaacaaacaataaccattgttggcatgttcacatttagagatgatgatacgtgttctttttattcatgccacaaattcatttaaaaatatatatattatcttctattcactattaatctattattaatacgattagatttatttaacatttgcatgcagaaatatgataacatttgttgatatttagctatatccggtcgcacatagtttgtaaatagaaatatattattttttcattttatttatttccattttaatttattttatactttcaatatattttcaaataagtgtatataaaatttaaaattatataaatataaaatataactttccaatttcctaattaaatatttatttgtctattttgcaaacaagattttatttctcattacttctatccagctctacattttggttcattttgtttaaataagattttgtttagggatgggcttacggattttcggtttggtttcgattcagattttttggttttacggtttttttagttttactaaaactataactatatagaaacaatatataattcgttttggttacggttcgatttttatggttttatggtttttcgaatttataaatattgaaaccatacaaaaaccatatacatatcggtttggttccggtttgaacacaatttttttggttattccatatttttacgaatgaataagttaaatataatatctttttataattaaatttttggtttctaaattactaaaaagatcaataattttaaccctaacactttattacttcataatacacgaactattgacttctcaacccgcatgaaagtcttggctcgcaagacattttatttagtgcaattactctttgattgataaagtattgtgttgcattctattcttattatggaatcgcattgcagagttgcatgggaagcgtttaaagagtgctaatatttgtatattgtgacagagaagccttgttaggtatttacgactgtcattatactacgagctgattagaatctgtaatcgtattatccagggttctacctataattagggttagtgaaaatcttgtaatagtagtaccgaatgatcaaattgtgctggttatttcacaagtctctaaagtaaaacagaaccttaaacttgctttaatgaaagagaatagtctgaatgattcgtgtattgaaacagaacaagaacaatggcttttataaaagccttacaacaactgaaagagagattgcaggaaataaaaacggaaacaaactgcaacagaaaatacttattcaactcctaaataaacgcttgacttattcagcttcagactttgtcaaacatccaacagtctctgcaaatataacagtttaagcttcatgtacgcaaatgctatcaccgctaatgaatattaaagcattacattgtgctcttattgggcttttccaaaatacgtaggcctaaaatcgtatggaaactaatctcaatggatacttgaacaatataaaagtcggcccaaaagtgaagcgcgtgatttattgaactgcaaaacgcaagtcttttacccactctcagcatgagcgcgtcgacgccacctcccccaaatctgtggactaacccatgcagaaatttgccgtttttcataaaattttaaaagtgggcgcgtgtgggtcgtaaacttgcatttaatctgatctcttctcaacttttttttttgttggcatgttttttagtcctaactctaaattaaacaaacaataaccattgcttaattaaacatacaataaccattgttggcatgttcgcatgagagatgacgatacgtgttctgtttattcatgccacaaattcagtaaaaaaaaaaaaatatcttctattccattattaatctattattaatacgctttgatttatttaacatttgcatgcagaaatatgataacatttgttgatatttagctatatccggttatagataatttgtaattagaaatatattattttttatttgatttatttccattttaatttattttatactctatattttcaaataggtgtatataaaatttaaaattatatgaatacaaaatataacttttcaaataggagtatttatttgtctattttgcaaacaaaattttatttctcattacttctatccagctcttcattttgtttagataaggttttgctcaggaatggacttacggtttttcggtttggtttcgattcaaaatttttagttttacaattttttagttttactaaaactataaccatatagaaaccatacataattcgctttggttacggttcgctttatacagttttatggttttcgaatttataaatattgaaaccatataaaaaccatatatatctcgattcggtttggttttagtttgattccagtttggacactggttttttggttattccatatttttacaaaagaaaaaataagtttgatgatatataaataaaaaataaatgtaaaataaaaataatatatcaaccaataagttaaatataatatataaatttttataattaaatttttggtttctatattactaaaaagatcaataattttcactcttaacaccttttttttaatgctactattattaatcacattataaattggacacttttttatatataattatttctaaattaaaaaaacaaaaaaaaaaactattcgggttttacgatttttaaccaaaccaaacctcgatagaaaccttctaaaaaattattatgaaacagatttttatacaaaaccataactaaaccaaaccatttatttatgtttggtacggttcgttttttttgccgacccctactttttcagttataatagtgaaaaacaaaaacaagaaaacaacatgtttatgtgagggtcattggattacttaatccaatgggccacaaattaacaaaaaaaatacattgctccaatttaatgaacaaaaataaaccttcatacaaagtgatccttgttttactccaaacaaacaatgaattcgtcaacaaaatgaaggcaaccattttgaaattgtccaggtaaagagattttgaagaaacagtttcttaaaaatcctattaaagagaaatgtagaatcacttgcagtaatcaaagcacaaattaagatccaaagagaacaaaagagaagattcaaaatgtcttttaacttgagaaagaagatcaaaatccaggaggaggcacataatgaaaacgcagagaagtttgacattgaaaacgataacattctaattcatcctcctgataagctcattgatgaagttctcacggtttccggcatcaccaccttccacgtagtgatttctcttcttcttgaggccacctagtggtgccttaagctggaatggccaaaggaagttgttggcttccttgaaatgaggtcctactgttagaatctcgtggatcaaatcctcagtgcaaatgataccatgctttccaagagcctgattttggttttgtatggaagaagaattcgtgagtcttaaacttgatatcagaacaaaactaaagaagcaagagccacagagagacagatctcaaacctgctctacaatagagttgtcagtcaaagctatcctctggtggttaagctttccgtaacctctcttgtagatcaattccttgacactcttcaagttagggaatctgaaaaacagaagagaaaagtcacactcttcaagactcttgttatctcatagcatcagattaaagggtttaggatgagagtgtatatacatacccgtaagtgacatagggctcaacacggcgaagcatgttcatcgtagccttgttgactttaaggaaaacaccattgaaaatctgcattacacaatgccaaaatcaatcagtatacaacactgatagaatcatttcatatactagtctttgccatgaaatgtgacattatcaaaccaactgattatcaacaaattacatggaaagattccaactttcaagacctaacctaagactaataacaacattgtattgaaacaacctagcagtttatgccaattcatcaaaagactaatctacacaaacacaataatacacgaacctgtctcaaacgcaagagctggagaatcttcttagtcttagggtcaatggcattgatactgcaatattaaaaagaacaacagataagaacaacaacatagacactggctttagaaatgcttataagacaaacaacaacagtataacatacccacggatacggatgatgaacaagagcttagcttcagggtcaacatagaaacctcccttaagcttggcctcgcgtttcaacgagatcaactccttctcctatcaaggataaaagagaagatcaactacagtttccaagtatttgtatttggaggataaaaatgtttaccttctcggcatattccttggagtattgctcggctcttttgaagataagcttcctgttctcggcgttcttcttcttggcggcttcaacattctgcttcttctccaaagcccattcctcctctctcttcctcttcttcaacaccgactctggaactacaacctttgactcaaccatttccgaatcctgcagatcaacaacccagattcaatgattaacgacgataaatcgatagatgatgagtggagagaagagactcgacgacactaacctctgtggagctgtaatcgaacgcaatttctcagaggcggaattatcagcggcgatgtgagttttatatatatgcttctcaaattaggttaactaaataacctatgggcctcaggagcccgtttacttaaaaagcccatggtttctaaagcccaaggatactaaattctataatcgaaaaactgaaatcgaatggctacgtatcaaaaatatccgaaatataaacacattttcaaaaatattatttctttctagattaaataattaaaaatagttgaaaatatttataaaatatttaaaataattgaactatccgaaaataactgaaaatatccaaaaatgaccgaaaatctcccaaaataatcgaactatccgaaaatattaaaagtataataaccgagtggatactaaattttaaaaccgaaagaatcagaaccgaaacaaatattcaaaataactgaatgaatactaaactttataaccgaaaaacccgataaccgaatgaatatatactaaaaccgaatggataaccgaacgccaagttattggattttctaaaaaagattaaaggtttcgagcgaaattattatagctgtttgggatatatagcctaagggaaggtcatgcagccaaagtgaactttctcatggagagaacatatgagatatggcaatctgtggttactctttaaccagacattagcatgtcccaaattctataaccgaaaaatcgaaaccgaatggctacgtatcaaaatatttcggatagccaaaaatatctgaaatataaatatattttcaaaatattatttatttttagattaaataattaaaaatatatataaatattaaaaatattcgaaaataaccgtaagtatgctgctgctagattgaacattcacatttttactccaaaagtttctattgcaagacaacatggtataggtatacaacaacacgaggtaagcccacggttcacatacattatctgaccaaacaaaattcgttttatctataacttacagacataaaaatcaactcgtttttaaacctgaatctgacaacaaccctccatatcaacagttttgagtttctttttgaaactctctcaaagtgcgtcacaacttcataccctactcaacgacggcagaagaagaggaaatcagggtggctgacatgacaagaatgcagccatttgtcagcggcttggaacagagagttcacgagctggtgctccgaacccccaatgggtgtccataatgaacctctgaacttgtatgaagcaagcccaaacacaggcaatgacatcttctcgctctcccttggttgcgtaaggctcattgattgttcactgccttcacctacaacagccaaacgttgtcaatagttctatctaccaaactattatcctacaaacaatttgaattcgcaccaacagtctctatttcttctaatgaacacacctatttatgttgtcattgtgattgatagtcaaatgatgctactctagccacatgtcactctaatcaattggaacattttggatccactcaagtattctgattagatatagtgtaagttgtggaacagtgtaaacctacaacttgttgttttgataaataaaagagttttggtttacctccaaaagatgtgtgtagggaatgatacgtcaagaaacaagcatccaggtccttcagtgtcggtcctgtgggtattctgtaaattgggtacctgcaaagtatcacatgaatttttagagacatgaacaacatattgcagcaagcaagtgcatgcaaaatacaaacaacaataccatgcaacagaaaaccagcttgaccgaagtaagtcacagcttctcagcgtcattagctcgggaaactgagctgcgaggtccaagacctgtattgcaacataggcaatagtcaggaggaggagcctaatattaacaacagactcaaacaagttcccaatttttttgtgagttagaatgtggtctagtttgttgactaaaacaaatagaaaagaatgtggtttagtttaagttgacgatgaccagtccctgagcagattgaacatttctgattagttgatagccatcagttgaaggttagaaacaacaaaggccatttctgagcattagtttttaaatttgaagttacctggtatgatataagagcataaaagatgataataatatatatcatcatcttagtatatagtatctacaccatgctttcggttctagtagagaaatgaacgcacaaaccttatcagcaaaaggttcacggatgtatggaaggtctctttcaagatactcaaacatcaaacgaccttgagagcctaaaggttcgccatcatcactggaagagtcttcctgatgttgatccctcaatgagatacagtctactctagcagaaacccgctcggaatcactatcgctgctaacatcgctacttgaatcccgaaaatcactgtcgctactatcaccaggacgcctgccataggaaccgtacatgacataatgaaaaacagcttgttatactataatgctgctatgatgagttcacaaagaattaagaaccttgatttaagagatgaatccaaggcatgagaatgagcatagatttgaatggctgacaaagaagggacatagtattggataacacgatccttgttgttattcaaaacaagaggcacaccggtgccgtaagcactccactctgcaaatgagtcccatatatcaccaagcacaaaataaggcacaagtttattataatcatcatctgctcttctttctcgtagcaatgtctacacagagattatcaccatcaccatcagagaacaacacagacttagattaaaaaaaaaaaaacataaaatagagattgtaataaaccttggataaaaactgagccggtacggatggtgtgaccgactctaaaaaccgatctagattactggaagataaatcggacggctcgagttgttgtttatgcggagaaggagctgatgatggaacgttagagacgtcgctctgagctctacggagctgatcgatgcgctgattggccctgcgagtttttgcggaagtgtagaaaggatcgtcgccgtgtctgcctctcgtcaactgaaatccagcacccaacatctccgagtagtcgtagttgagtttttacctatatatctatatatctatctaagcttaatttagttgatttagcgtgaatatgtgtttgtctccgatgagacggcgaagaagcttggtcgaatcggagattccaaagaaaggggtaaaaatggatcgaatgaaggagaattgatagaacaaaaaccttctgatgatatctaagctccgattaaacaggcaaaagattagtggaagaggaaaatctgaagaagagattcgctgaaatggagagagatttggtaatttcaaaaaaaggggtcaatgaagagagaaagacgattggttagtaattggagggggagagacaaaaaccattgaataacacatgaatccctcataagttagtgtttttacattttggtccttttcattttgatgattgattacagttttacccgaaacttctttgtaattcagttatacgcttacttataaacaagttaatcatacggtaatgcaaggtattttagactgctcagatgcataatgtagatggtgcataggaatgatttggggttatgaatgtaacattttaaaatctgatgagaaatatgtgactatgggaaatataaaggggttaaacattggcaaaagccaaaggccatatgtatattaggaggctctttaatttaatggttgatactcgatgcttgcttgctagatgctgacaagattataaagaaataaaaaagaaaggctgtaaaacatttggtctttctttttttgttcatagataagcttcacaatgttcaagagtaatcaaaaactatactaccattgaagattcgactaatgcatgtacaccaactacattcatcattcattgacaatgacataaacgtatcagaacatatatattcatgtatttagtaacacttatatgagattataaggagttttttgataagtgaaatgaatgaattttcacatattattgagcacctgactctgcattctgcaataggcggctagtttttatcagccacataagtagtcttttattatttgaagatatgcacatgaccaacacattatagtgttctttttgcctggcttcgataggtccacaaataatgggtttgatagaaaacaattcttgcataatgtgggggattcgcctagctagacatgaagcatttttttggagtatataaatggggattttagcaatactatgattagtatttggattatgtaatctgtgatacttaaacacattgcctgcatataaatccatatattatttaaaatatatcatttttgatttttgacagaaatcatagagattacggaaacagataaaagcacactccagaaaattagagacaaatattactattcaaaaagattcagatcgctactaagtgagggtcgccaaatcgcgagtcgaaacaccgattttgagtccgcgaaattcggaaatttgcgtggttgccacaataccgaagtactggaatcctcatcgtgaatggaatctctatatgtaatgtttcagtgtagtaaaattcaggtcttagcatttgctttctagatttgtatgtctaaaataagtgttaagcttgaatgtttgataacagtatcgaccataaatctcccatctaagccgataatgtgttttgatcatcattgtgaattttaaatcagtgaaccataagatagcccaattgggcccaaataatgttgtctgaataaagcccattatcaacagtaacggagttcaaagagtgggtaagagatgtgcgacgtcgttcaggagcttctatatcacaaatcttccttcattttctcagtggaagaggagggaagctttcttctgtagatcttcgcttcctctctctatctatctctgttgagaagaagaatcgaaactttgaaatctgtgagaggaggggttcatagttcgattggatttgatgtctttggtgcatctgcttttgttcgccggccttgtaatcgccgcttcctcttcttccccgggctcgcgcttgattctccgggaaatctccgatcagaaagacaaagctgttgaattgaacactaccaacttcgattcagtccttaaagacacccccgccaagtatgccgtcgtcgaattcttcgctcactggtcagttcttcgattgcttttcacttttcacttaaatctccacttttggttggtgggttttgcagtttatctactacctacagagtttggtgctggatctagcgttgggttctcttgcaagtgtgttcttataggaaaagatttgaactttatgatcctattagtgtgcttcttctctaatcattgctactagaaggctttatattttcttcagttactagtttgggcgtttactgatgcgtgtatcgttttcaattgattctaggtgtcctgcctgtagaaactacaaggtaacataaactattcaaagcctcaactttggagatttccgttgcctaaaaagtgttactcttatgcagcctcattacgaaaaggttgcaaggctcttcaatggtccagatgcaatacatccaggaatcgttttgatgactagagttgattgtgcaatgaaggtatttactccatgctccgaatgtttttatgaatcatgttaaattctcttggttcactgtttctgagctaagtcggtccatttccctggcagcgcagacgaataccaagctctgtgacaagttctctgtttctcactatccaatgctcttttggggtcctcctactaagtttgtctctggcagttgggaacctaaaaaggataaaagtgagatacttgttattgatgacggccgcactgctgagcgtttgctcaactggattaacaagcagattggcaggtttgtgccacaaatccaccggacgtttatcttcagcattgactcgaaatatatctagcagattcaaactatgtttcatctttgaagtgtatctataattttccttaccgagtttgccaatatcacatcttacttagtctgttttgtttctcaataatttgcagttcttatggcttggatgatcagaaattcaaaaacgaacatgccctgtcgaatctaaccgactacaaccaggtttctagacttatctctgcctaactttgctgatattattagcgtttcgtctaagattaaacagctttaagataaccgggtgttgatttgccacagatttctcaggctgtgtatgatgtcgaggaagcaaccgcagaagcttttgatatcattttagcacataaggttgagagatgtgtatgtatatgaccttcttccattcgctcagtttcgttaaaaaataagtagtttcatgtcgtgtacaggccattaagtcatctgaaacaagtgcttcatttataagatttatccagcttctagcagcacatcatctttccaggaggtaaattaaagtgtcattatcctaatgccgtcacaagcattttgatgatcactttctttttccacactaattgtgaaatttatattctataggtgtcggaaaggagctgcagaaattctagtgaactatgatgatttatgcccttctggaaattgctcttacgaaaaatctggagggaacgataccctgggaaatttccctatttgtggaaaggatgttccgcgtggatactacgtgagtgctagcaaccgactctattactgttttcctgtatatccgcattagagatctgattgtcctaatatcatatttggtagatgttttgccgtggcagcaagaacgatactcgcggatttaggtactgtagtttctttttaaacttcataccatgatccttcacttcagtttagtgaactattccttaaatgcttgactgtagctgtggattatgggttctgatgcattcgctttccgtgagaattgaggatggagaaagtcattttgcattcacgacaatatgcgatttcgtcaacaacttcttcatgtgtgatgaatgccgcctgcatttcaatgacatgtgcttgaggtaaaaataataataataactcacagttcgatttatcgtggtatttgctcaactgaacctcatatgcatgtgtttcatggacagcgtcaaaacccctttcaaaaaggcacgtgatttcgtattgtgggtgtggagcacacacaacaaggtcaacgagagactcttgaaggacgaagcttcccttggtacaggtgaccccaagttccccaagattatatggccaccaaaggagctttgcccattgtgttatctttcaagtaatcagaaaagcatagagtgggaccatgaacatgtctacaagttcttgaagaactactatgggcctaagctcgtatctctttacaaggaaaagagtgtcagccggagcaaggaagagaccgtctcagccactgaagacttaacagtggccaccaatgctctggttgtgccgattggagctgcattggcaatagccatcgccagctgtgcatttggggcgcttgcttgttactggaggacacagcagaagaaccgcaagtattacttccatctatctatttaaatctagtggtagctaccaactcctgttttcttaccatttgtgggccatcgtttattttcaggccgaggagaaggtgaaactaaactacaagaaggtcttgatgttttcataacttacagacaacaaacacaaaggctcttgtttggagttgatataccaaagtcgcttcctgcaggtcctttccttgtaacttttgtctctgattttgaaagatagtccagattcttgtcttgaattttgggatacaaacacagagagacacttgtgaatgttgggatctttataggaatctttatagtggtttataaatttgtattggatcatatggttagagttgttgtgtaagaattcaagatgagtcttctttgtctatctatctgcattgcacagctgggaaaacacttgagaagagagctttcctaatgagatacttttttttgtttcaatctgttaaaccaatccaacattttacatgtataagccagaagttatatttacagtgtcatttgactttgtgtgtgtgtgtgaaagaaaagaatgagtgatcatcgtacgcctataatgtaagattgcgtttgaggcaagcgccatgaatctgtttcttcatcagatgaatcatcggagggagaggtgtctaaggtccgagaatggcggcggcaggtggcgactgctttggtgacaacgtagatgggtagcatgattccgagtattctcagaaataacaactgaaaccaaaaataacaacacttagggttcattcattcaaattatagtcccttgaatctgttgtgagataataataatctcaccgtgaacaaagggaagacatgaaggtttgatccggtgaggactaaagggagggtatgtcggagaatgagaagagccatgaactgcaaattacaaacattatgagtaaagacaaaatcaaagtgttggtttggtgggaaaacaagaagggtccgtacaatgagaacaagggaacggcaacagatgaagcttgtggtggaagaaagaggatatggttggtcaataaaagtggaatcagcaggtacaactgtgatgaaacgatgctcccgttgagagattccccagtttcccctgaaatggagaggaacatggcctaactctagcaacggaggcggcgctgtataatccggcttgaattcctgaacaaaaaaaaacatactacttatcatcagatttcattcagaaggacaatagaaagagaggagacaaatagctgttggtccagtggtaaatcttccaggtggaagtgctggattcaaggtgggagggatctcttctccgaaaaagaagaaaaaaaaaaaagagaggagacaaacctgatggcaaatctcgcaggtggtatcacctttctcgttacaccatctctgtacgcacctcctatgcgcatactgccaagttaaaccaacaacattgatcatccgatccaaccaatgttctcttaacttgggaaaaatgtttctaattgtgtttaccttgacgctgccgctgcaagaacaaggagtctccatgttggaatccaagtcctcgtcgtgacagatcctgcactcagccattgacaaatctccgttacgcagcatctcaagtgttttatcgtccaagattgtacattcctcaacgggtatattagcttgcaacatctggttcctgctctgaatcgcagcctcaatcgtggattctgttatcaaccgatccaccagcagcacgaaatgatctcccatgttctctgttctcacggtatagaaagaaacgtgcagctgaagaaatgataaataatgggttggggtcagaatttgcatttaatgctaaggagattccatacgcaacatgaacatgtgaattagaagatgcgaattaatgaagaaaaagtttgaaacattgatgagatcaaggcgacttaaaataagctaaagaagtttaatttgtggattaattgaaagagctaatgatagatggtggtttaggtaaagctgaaccaaacctggttggttaccagaacacaaaagctgtacaaactaaatatgtttcttattgtttgaccaaactaactgcacaaaagtttatcaaaacggtttagtggaatttcgcacccaaaaaaagaaaattaaatctaagaatctgaatttaccgtagtcgaatcgtctatataacggttttcataatttgcaataaataataaatttaagacggtaaaacaaattggagaaagttttgaatgaatgaagaatacacttgagacaaaacataagacaaccgaaaagagagggagaatcgagaggcagacccaaattttaggagatggaggagcaaaagagctttgtaccgttttcttctgcttttgaaagaaagaaagaagaagaagaagaagtggaaaagcgaagaaaaaggagacttagaagaagagaatcgtatttagtttattctgacgctaaagccttaacaaaagcttcctttctttctatctgatttccgaattattcagtcaggttatataaagttatgtgtgtttagagatgaagcaaagagatggagtaatagattctcgaatcttttgattgttttcttactttataccaccaaaacaaaattgacattggagacgtatccgtagatgtacatgtatgcatacatatacacgtggttatttcatcactaattaatatatgggcagagaaaaatgccttggaaaaacaaatagatgaaattgacaacaatcaatagtagtatgttatggatgaaagaaagaaaagagagtaacccacaacgatgtaactttttcagtgtaataaaaaagcagtttgacgacaaaaaaaaagggttaacaattgttggattattgcatgatgacacgtgttagtgttgcgagtgtgaagcgtatcacggtggaatgaggtgtgacatcatttgaacggttgataactaaccactaaccacaatcgtatcactttttttctttttgttaatcatagtatttgattgattgatttataattctgtgtattttttgacgttaaaactaaggtgtatgagagatttttaaaagtgtacagtttcgtgtttactattctctgcgatgtcgattgccgattctagtaggttttttttccggcaaaccaaatctcaatcaagcaaagtgtccatggtacgatacgaagaagaagattaagattaacgccgtgaagtatgatcaggcgattgctgcgtttttaacgccgaaggaagcgttttgccgattataataaactttgtttttgtgggccaaatccgatttattaatgggccgattaatgggcttaaaacaaataaaagctgaactgttgtattgaatactagtatatatacaaaggaaagagtgggtttagtcgacttccaactttagagcgtttgtgactctcaaatttcttcttctcttcctcttcaattgtgcagagaaaaacttacggcaggataatctaggcaacgttgagttcaatttccggtaagaaaagttcaattctaagtttgtgagatcgcttaaaaagtatctgactttgtatgtattttttcttgaagcccctgtctttgagttttactttttagaggaggccatggtgtggtgtaagcattgtgcgaagaatgttcccaaaattcgccccttcgacggtggtttgtaagtgttttcgagatttttaaactcttgcggttatgatttcactagctccgacttatgaatgatgagcttgtgcttcttctttttgtttttggtagggcatgtgatttatgtgggaggattttggaaaacttcaatttttctactgatgttaccttcgttaagaatgccgctggacaggtatgtatactctcttcactatgatgctatctttttttcgtgccttttgaaattatttcttgtgcctgcgtcaggtaatatagtgacgagtgttgggaattcaagctcacgtgataggagaaggagaaaaggtatatagagatgagcttccctttttctcaagtatcagttcatttggctcatcttttgttgttggtagctatagatgagttaaggaatttgaaagatgccttaggaatcggtgatgagagagatgatgtggttgacatggctgccgtattctatgaagtatgtttagtttttttacatattgatctgtcacgattcttacactatcaaactttatttgtcttctgaaggcggcaatggaccaaaacttcaccaaagggcgcagagctgaacttgtacagtcttcctgtctctatttggcttgcaggttagaatcatgctgagtttatgttacgagtgatgcgttatattgctgtatgttaaccaaatactttctatacccgtagggacatgaaaatttctcttctttttattgatttttcaagctaccttcgagttagcgtgtaagatgaattgttttttatttccatactacttttctctctatttgacagcctaattatctgttaagtctactgcagagtcgagtaatgctggtattggtttcatgtctagttacgagttaggttccgtgtacttgcaactctgtgaaatgctgtaccttgtgcaaaacaagaactatgaggagcttgttgatccttcaatcttcattcctcgattcacaaacagtaagcatgttgtcttttggctcccattcttcttctttatcggggttgatgcagaacattcgatttttttatcagttggtgtgaacatcagtcaaaatacaaaatagttgtatcaaattcttgtttcattatacactgtaggcttattgaaaggtgcacacgctaaagcaaaagatgtcgcaaacacggctaaaaacattatatctagtatgaagagagattggatacaggtgtgatagttacctacatgttctttgtcttaagagttatatattatggcttgtgttaatgttggccatctattcgcttgcagacaggccggaaaccaagtggaatatgtggagcagcaatttacatggctgcactttctcatggtatcatgtactctagggcagacattgtaagaatctgattcaagcttctttaaagaatcttgttataagatgagagcaaagatgtttcgatttgatgtgtttttctatataactttcaggcaaaagttgtgcatatgtgtgaagcaacaataaccaaaagattgaatgaatttgctaataccgaggctggaagtttaactgtgagtaatttcatttgcaggattatgttacagatcgtttctagttggttcttttttaaatgttgtacaatgcttgtctaggttgatgagcttgatgaaagcgaagagatattgcgtaaagaaacttttaccccaagaccaaattctgacaaaggagtagtgaactgtaaacataaggatttaaaacgctttggttatggattatgtaagagctgtcacgacgatgtaagtctctttccattttattgttttgatgcttatgcaactggtgacaaatggctccgagagttgacaatcagatgcttccaaattttttccggcagttcattataatttctggtggagttgttggtgggtcggatcctcctgcttatcagcgagcagagaaagagagaatggaaaaagcagctagagaagaaaacgagggaggaattggtaacttaaaccacgatgaacaagttaatgtaagcaaaagggcaaaaaaatgttcgggtgagtttacttcatgtcttatcacttatcagcttaaagtttttatttgctatcgttagagctcttgagaatcttttgtgcgcagagaaaggcgaaggagaaacatatgggggtgaaagacatgctgaatattcggatgaatcagacatctgttcggacgacgatgattctgaggtcgaatgcttaaacttttgaatctgaaacatgaaatggagaaatgctctagagtctttttccccttactagagtttcacttgttcactgttttctaggtggaacatgttcttctcggtgaggacgaaacgcggttgaagacaacggcctggaatttacaaaacaaagactatcttgaggtgattgataggctatatcatttatcttctcttggattcggacactcggtgaagaatttatattgtttggtaggagcaagcagaaaaggaagcagctctgaaggctgctaattgccccgaagatgcaagaaaccttgtggaagcttctaaagcagctgtggcgaattctagaaaggaaaagcgacgaaaacgtgctgaggaagctaagaatgcacctccatcagctacagccacggaagcagtttgcagaacacttgagaggaagataaaaatatatagcatcttttgaagaagttttttcttgggtttctgattttgagtcttatacagagactcagcgggttaatcaacaccatgttttggacgagctcttggatactagcgtaagtttattatcctctcttctcttgtcttgttgtttccttagttgtcatcactttcaggtctatacaattttgttcttgtttcttctttcagccaacacagaagaaaccgagaaccgagacagtaacggagaagaagaaggaagagcatgagattgttgaagatgaagaagatgaagaagactacgcagcaccacacgcagatgagaacttctatgaagacgaagtggaagaggaagagaatggttatgattttggattgtattaatcatactattactattcactgcgaggtcgatagttttagttttgtcacaacatggattcacacctaacacgattcatgtttcggcgaaacaatagttttagtgtttagtgtgcctatgatgatatataacaaggagcaaagcccaacacaggcccagtagtaaaagaagagcattcaaacacaacaaaggcaatgaagaagcaaaatgctgtttacaagattgattgatgatgatgacgacgatgtcaatgcatccaaaactctgtcaaaagaaagtcattcatcctcctcacagtgacatcatccaaaacctaatctcatatcatctaaaccatagagcaaaccataatcctctgtctcctaatacataaaggccaaaatcaacgagaagaggtgtggtgtgtgtttcagtgtttgttcttgatcttaacaccaagctcacctgcaatgataacagtagaagccatatccagaaacatcccatgttccactactcccggtagcctcagaatcgcatcactcactgctcccaaatctcccatatcctcttccacatgcatatccactatgtaattcccattgtctgtcacaaaggccttccctttctctcccaaccgaagattcgcttcacacccgtatccttccagcagactccggagcttctccgccgtgaacttccagcaaaagggcactatctccaccggaagagcaagcttgcttccaccaatatgcttcaccatcttggagtcgtcaacaatcaccacaaacttcttagaagctccttcgatcatcttctctcgaagcagagaccctcctctgccttttaccaggttgagaaaagggtcgacctcgtctgcgccgtcgatggagagatcgatgacagggtgtgcgtcgagatcagagagagggatgccgagagacagagcctgctcctgcgtcttcttagacgttggtataccaacgatgttctcgagtttgccttgacggagaagctcgccgattcggtcgacggcgtgtttggcggtggagccggttccgagaccgagaaccatgccggactcgacgaattccacggctttgtaagcggcgatacgtttgagctcgtcttgtgttaaattcatgggctgaggcggtgaagaggcaacatcaaaggcggacaaagatttgtccgatgtaatgaagagaggatcatacgcaagcgccattcgaaatcccgacagataaaaaaacaaacaatcaggattgtcggaaaaaaaatcgaaaattggacaagactaagagatgaatttggtgtaaaggaaaacaaaattgcagaaaaaaacgaaggaagaaacgttgtggattaaggaaagcaaatatgaaatcgatgaaacgttcctaggaaggagattaaggaaccctcgacgggaaaaatgagggagaaagataagatttttgagaaattaagaatgaagagaggaggtcgaatgaatatattgaggaagaatagcgtgaaagttacaaagaatgaagaatgtatttgtgtggtggcggagaaaagaaaagaaagtgaagactgaacgaagaagaagaagaagaaaagatagggtttgtgttttgtgggcgacaacggtctcactttcgaggttacacagacctgaattcgttttttgtttcggtcccatattttgtctttatttacataaactaacccaacatttatttacatttaccaaatcggtgcttcactttccccatgattcccaaaatattctgtcttttcttttcttttttctgacgcacccttaatttttgtttgtacgtaattaattatagagtaacgtttaaaaatatgaatgggagctagaaaaactatagacaccgttcacaaaatgaaattatcaaccacaacatgatgatcctattaaaaacaaaaacacaacatgatgattacgtagtatatttgaccaaacatatccgaatgtataattataaacctcatttaagttatcaagaaacacttttataattagatgtattttattagtattgtttcatcgcattgacatatcaagaaaatatacttatcccacaaaatgaaagcataaataacgataattaatttatacatattttattttcttaaacctttaaattttgaatgataataaaaccgcatagtacaatgcagttttaatagtaactaaaaaaaaaatatatatatatatatatatatatatatatatatatatatatttttccgttattagttgatctttaccgtactttaactgtaattaaatcgcacgtttttattcagtagcgaatataaaaaaatatttagaaaaaatgataaaataataaaagaatatggtggtttacatatctatatatccacataattaaatatataaagagaatttgtcagcaactaaaaagataaagaaaaatatgagatcaagccacgtgggctgatgttgcggctgcgagaagccaatgcaaaagatcaataaggcgaaacgcgatcaccgtggaggaaacgggaacgctgacgaggaggaaaagcagcgtcgcgattgctacagtgggtcgagagttcatgaggaagctctgaagaagaccaacggagtcgcagataacagagtcgtagctgttgtaaaaacgtttctcccaatccatccagtgagaaggaggctcgtagttacgctcgaccatcttcatctcgtggatacgtttcctaagaacgatcatgttctcgtccaccaatcttcctcctccatagtaatgatcttttcctgatgacgccgcagcagagactctcatcgtcatcttcttcttcttgggaatgatggctctttgagaaagaaccagtggatggaatcggagtggtgaaatcgaaggcggtgaagaaaacagtgtagcttccattgtgatattgatcgttgttattttggaatgttgttgatggagaagatgatggacagttggaaatgtatttataacatttggataatactattgtaacaatattataacaataaagtggatgatttatgattagcgcgttgccattcgcaatttgattaatggaacccacttgcctttacctccacgtcattttcgtttcccatcattcatgtttcagtggttctattaaaatctgtttacacgtttttactattcaccatctaatcaaaccaacttgtataatcttttatggattttaattctactaaatatctgttggatatagggaaaaaatccgaaaaaatcttcatttatttttaatttgcccgtttaatacctgtattatttaatttgcccgtttaatacttaaattcatttttatgtcttttaaaaaccttcatttttaaattttttggcaaaatcagacattcgagttaacggccgttaacattgataacggaattactaaccgcagttaaaacttaaccctatgatatttattgtttatatacaattgtttttctaataataatgagcatattatcttagtccagtggtttatgagaatttacattacgcatcaactcgagatcgaatctcatatttaacaaaaattttggatttttttttttgtcagattttttttggattcctcttctcaatgttagattttgattctaggtcaataatagccaccagagttgacttaatctgtttaagactctttttttgcttctaggtttatttcttctaattgagattagataagagattgacattggagacgtttagaagctcaccaaggaaaactctcttcttgttgagccgatcttcatcaatacccatcgccgtcgaagctttgcgttttgctgccgctcttgtaaccctcacccatatctcttgctccatcatggttgaattgagagagggagatagagagagagatgaagagatagagagagagatgagagatcggatgagtgaaagaagagaaggggagaagaggaagaaaaaggtttcgaattgatagaattagggtttttggtcgcttcagataatttgtggattgtgggtgagaagaggaatttttgaaagtgaaaaatacaaaaaaaaatataaaaaaaagaaaaatccaaaaagttggctggttatgagattcgatttttggttgatgaggattacaatctctcacataaccaccggactaagataatatgctcataactattagaaaaacaattgtatataaacaataaacattatagggttaagttttaactgcggttagtaattccgttatcactgttaacgactgttaacttgaatgtctgattttgccaaaaaatttaaaaatgaaggtttttaaaagacataaaaatgaacttaagtattaaacgggcaaattaaataatgcaggtattaaacggacaaattaaaaataaatgaaagttttttcgggttttttcccgttggatatatgtttttattgtagttttactttggtttgtttttttatatataaattttatcggctgattcggttagttttagaagaaacgcatcaaaatgttttagagttagacttttccttgaaggaccataatactatttagatgtgcatatatctgacctagctcccgaagttggaacatacttgaaaagttagattctatttgtaaccggtcgacaaatattaattctatgaattagaaagcgcaatttaataaagaaatgttaatgataaacagggaaagaagaagttataattgatgcattgagaaaactcctacggtacgttagatcagcttgttggaacgggaaacacggttatcggaaagtgaagtgaaattgagagaaccatccatgaattattaatgcacatgatttgcctaatgcgtataacgactcttcttcatactaatcgtttttataactcgttatattatattgtatctattctttatagcgaaattgacctcccattacaatttgttttatgtaattgcacctgaaaaagcgtacaagtcggtgatctttttaattttgtatgcgcttacttctctgaatattttaataaccattagacattttaagcaaattaatgggagagttttatattgcgtttcaaactttcaatgctttgatttgtcttacatgtccatgaagactcaccatcacatacataacataaaagtagatcagtaaaatataaacaaattcatacaatgcgattatatactcttcaattgtaaaattatgggtttagactaaaagaaattatcaattattaaatgtctagaatgcaggcaacgtaaggtacgagaatgtttggaccggacgccacgtcccattctcacgaatcggatggtgtgtatttgactttttcccaatgggcggcttcttaaaacttatgatcatcttatttaattagggaaattaattcggttattagtataataattaaataatctaaagtttgagtttggttggatcagaaacttcttcagacgtcgatcctgacgttagcacagttgagttttcaagccaatgttcaaagttccccacatctctctatacgttttctctccttcctcacattgtttttggaagtcaccgcattagaccttttcttctcttaaatctaatacaaacttatgaataattagtgctaaacaggagattagtcgagtcttacattggtttaaaggcaaagagaggtaagaggagcaaccacttttattcgaatccctttattctcacactttgctacctgctgaacaatggagatgaatccattatcaccactaagctcgaatttattaacagtaagtgacaaagttatcacaagtgtgtgtgtatgtatagtgatctttctttcacctttagtttactgtgttgttgttgttttgtattgggatgattattaacaattacaattttacaaaccttcgaggacaaagggacggatttcgtcaagctcatcatccgaatccgatgtttgattttgatcgtcaagtggttgattgatatcatcgtcttcaggtttctccgtttgatcaacctctgctttatccagttggactcctgaattaccagtttctccattgtcaacaagaagctctagcttttgatactttggcttgtttttctccaggagaaggtacgtggcgctataccagaacatcagaatccggctttgagctgctatcgtctcccttatccgccttcctccaaacgacagtcgttctagcgcctgccaaacataatgtaacctccaattaccttataaacagaggcaatgaatggggtttgacaggaactaattgttacctgttctccagtttggacgtcaaaagtgttctgatgatcaaacttgaggccgctgaattcgttgatacagagtccctggaaggccctgaacaaagacgagtggatgctaagacttaagtgagttcatatataaataaggtcatcatcgctgtatagtaatttggtataaggtggttcaccatctgatcaatgaagcacgaggaatccaacggaagatgattggggtgttgtctgcattgacatagtaacctccaaatacgatgaaaactgtcatgagagatggtcccacggccattgcagcttctgtgcttgggaccatagctccaacagttagacccattgcagacgcagcaaatgactccacagtcactatcccacaaaattttccaaatctggcaaaacaatttctttgttaaggacatagttgacatgtgcatttctcactggggttaatgggttggtcaaatatacgaagaatgctcaagaatggcttatcagtaccattgacatttacctcatggccacaggaataacaaaatgatagaaagcttacgaattaccttgacaaagtgggattaaggcgagccatggggtatagtacagcaccaaacatcaaaggaaatgcagctccaataggaatttcagctattgttttggagagcaggtaagggcctaaagaataagaccctttggatcgttctctatccactatggcacgctctttaggaaagacaccaactgtctttgtaagagctgccattgccgtgtttattgcagcaacctgaagtatacagttatcattgcttagtatatatataaaagatattcaacaagacagaaaaagagagatgtatatagcaaaagcaaaatgtgtaagacctgaagcaaacccattctgtcctgaattgacgtctgagacttccccattctccagaaaacagacccaaatatcacagcagatgcaacagacattcttgcacggactttgtttgttggcccatcccgagaagcctatgaagtcaagtgaagaaatcaatcagaaaaactgttcaagttaaccttgaataagatcgtgtgtacaattcaaggacccttctatgatgcctacggagtcgggtgaaacatttagaaacacaaaatgctaaaaaattgtcacatgacagaaagagacaattcaaagattttcatatcgttcttaagcaatcattagtaaaaatcatgcaactatttaaaaccattatcagatattccaggacgtcagaaaaggtgttcaagcccaacatgttatagaaagaattcttcagatcatgcataggagaatacctgcatccatgcacgtttaagcagcaagaaaaactgcctccaccaaccatctgttctctcaacaatggcttttctgcgaggtctcatgccgttctttgtttcttctttcatgctgaggggagtggcataaagaaccgatgatgaacgctgggagaatgcatcaacaagagcatgtactctcttctgcgaagagtagaccgtttccgaagagctatagtcaacagatataagatcagcaagaaactcagcagggttcacatgctcagggcaaaggaacctgctcaacgatcagaagaacagttgtcagtggataatcctaaagcacttgcttaatggagacatgtgacatataaggggaaatgttcataaacccaacccgaagttcccgaaatatgtcagaggttcttttcctgcagggccggcatagactagagttccttctgtaagtaacacaatgtcgtcaaatttagcgtacaccgaacctctaggctggtgtatggagcagatcacagtatgtccatcctgtgcaagcttttgcaatgtctccatcactttctcagcctggaaggcatcaagccctgaagaccacaagaatattttatcatcctctaattcttttttaaaacaatccatcaatgttcagaatcagacagactaggcatttaccagtggtaggttcatcagcaaatatgacagagggactagcgatcaattcacacgcaagtgacagccgcttcttctctccaccgctgatcccacgaactttagcatcgccaacacatgaatctgcacagctgaccttttggagagccacaaaagacgatcaagaaacataattccaggatttcaatctaccacaatatcatccaaaatgcagagatcaatgaaacctcaccagaccaagtttgagcaagaggttgttgacatactcatccctctcctcagcagaagagatctccggaagctgaagctcggctgcaaaagaaagtgtttccctgacagttaactgagaaaagaagagatcctcctgtctcacaaacgcaagcctgccattgcaagaaactctctcaaacaatgatcagattttcacacaaatatagactttgtataactcataggacatacttataagctttgctagagctcggtttgccattaacctccaagagacctgacaaatgcaaacgtggagataaactaagctgtcctgctaaaacattgagcaatgttgttttcccagaaccagaaggacccataatcgctagcaacctcccaggttttgcttctccggatacatttttcaacaaaaacctcacctgagaatcacataatcaaccaattctgattcggctattaacgtgaaattggaaagactaatatacgcgcaatcgaaacatgcaaaaggagaagaaatgtgctcaccgatttggaggacttatcggagagcgagcaggtgatgttcctccaacggattgtcaccggacgaattgaatcaccaccaccgtcttccgtctcagcgtaatcatcttcagcttcgtcttcaggtaagagagcgatgccaggtccagcgaagaggcggaccaacagagcggcggccaccgcagccagagccccgccaacaccattccctccgatgccagaaacaacgtccgctaaagatttcccgccaaaaggcgccataatttgtatccctgtgtcagtgactcagtgtcgtcttctacttggaagctccggtgaggtaaagccttcaaatccgtacgaagcaaagtaacaagtaagaaccaaccaaggctccaaacattatctcttcttctaattatttaacctttgtttaaattttccctcaatacttaattaacctttgactcggcactaatcagcacaacagagtaaatttgaccatatagatttagacacgtgtgcatttcatgataagagatactcaagctttaatacaaacaagccattgtcaaattaatatatagagactacaactttcaaggacggttaaaaaaaaagcttataacgacaagtcactgaggttcgatatgccacaaacgaacggaagcgtcttctccggaacttgctacggtgcaatcatcaatgaaggcgactgcgttcactccaccgagatgagcgtttcttgcggttatgcgacttgaagctggcttgtccacttcatatacaatgacgcaagtgtctatggaccctgtggctaccatcttgttgtttggtgaccatgccaagctgtttatacgagccgtgtggaacaacatgttgtttagcttcacctgcaaaacaaaaaccgcacttccaggttagcgtttaagcatgattgaacatataagacatacaagaacaactctaatcacgtcacctgtttggtctcgcgatcccagactacagcttcgcggttggcatcaccagaagcaaacattgttaagtcaggagagtaacgtatcactgtcaaagcacctctgtgtttctccaggactgcttcctctttgaggttgttgtcccctgagactgagtatatgtgtaacttcccgtcttgccctcctacaatcgcttctttcccgtcaggtgagatcacagaggctgccacagcaaaacccaaatcgatcttgctcaaaatgttcagaccattgagcaatacaactccggaatcaaacgagactagtgctgtggcttcgggagaatcaacggctatgcttatgtccagaggctgatggcctatatcgacatgttctgcagctccatatccgttgtcggttaaaggaattctccaaacctgtcaagaagtgaagatgtcatatgcgatgtaacattgactttaacacagtccaaacccatatctcattgaacaattgttttgttagcagaacttgtaccatattatcatatccagatatgaaaatgctagattcagtagccgctaatcgcttgattttggtgtctttcatttgtaacttgcaactgtacccaaccccttttagccatttgacaatgagaccatcatagctacaagacagaatcgtcttctggttttccccaagaacagccaaagaagtgacgttcttaatatgtccagataacagcaagggaggcttatccatatcatctgcagagaacaaggacatagtaccgccaagagacacggtaatgagatgatcattctgccaaagacatcccacaagcatgtcttctgctccaccagattccataaacgacaatgtcttaattacagagccaatagttccatcttcagctacctcccatactttggcagacttatcagcagacacagtaagcacctaaaaactcatcaaatatcagtactaaacattgcatagcttggccacacattgatatcctaacaacaattacccgtttgctgtcaggactccagctaacagcgtagatactgcctttgtgaccatcttctgaggccaattctccaactttatctccagtcttgccatcgtaaatcataccctttttgtcagagcttacggtaatgaatttagtaccatcaggtgaatatctgatgcagttgacgaagttggaatgctccctgtgtagcagatggtactattagtcaagaaaacaaactgttaatatctaagagacatatatgaattgagaagaagaaagatgcctgtgagaagagtgaaacttaaaaggtggtccatcataaaagttaaccaagaagtcttcaccgcatgtggcaattcggaaaggtctcgttggcttgaaggcacaactcaaaaccctacgagaatggccatcaaaatcccccattgtattgccagagtcccatctacatatataaaacaaacacaaattgatcaagccctagagatcattccattctacaaagtcatcattaaaacctaaattgtttgcctaattaccaaggactcgaaattgaatctcaaaatcaggaaagaagaagaagaagaagtggaggagaaactcacgcgaaggatcgaacaagagatttgccttttccatcgccggaagcaacaattcgaagtccatcgaaagaccattggagatcatcgacacgaccagcaaggactctgaactcgttcttcagcacgaagccgttgtgcgttccccaaacgcgaacagtaccagagacatcagcggaagcgatccattcgccgttgggagagtagcgagcaacggtaacagcatagccatgttcgccgtaaacttggacgtcttggagttggcggaggctccggatgaagacagagcggccgttgcagtagagaatggtgtcggatttggaatcgccggagatcaaaatgccgcggcctcgttcggtggagggaacacaaggaaaggtctcgaggagtttcgccatcgtggaattgttggtaggaagaatcggtgaaggagtgcgtcatttcttcttcttcttcttcttcttcttcttcagaggaggagaaagtttaggaggaaattaagggttggggattttgaacgattcatcaaacatttgctaattttgagtcagctgatgtcgagagacattgtaccggctttttctggtctggtttgatgttttttcggttattagttaaatcacaaatactgaaccggcagtggttgggttgggtttggttgggccatagcccatagctaaatctctttcctaggttctttgctcttttcagctaccaattctcttctcgcttgttaggcctggccaaataaaccaaactgaatatatcaaacccaaaccaaagtaaaataatcgaactgaaaaatttaaaataactgaatgaatactaaattctataattgaaagaactaaagtcgaatcggtactataccgaaatatttggataaccgaaaatatccgaaatatattagttatttctatattaaataattaaaaatatgtgaaatatatatataatagtaaaaataatcgaaaataaccgaaaaatatctgaaatatctaaaaataactgaaatgtacgaaaattttgaaagcaaaataaccgaatggatacgaaattttaaaaccgaaagaacaggatccgaaccgaaacctaaccaaaatttcaaaataatcgaatggatactaaactttataaccaaaatatctgataaccgaatggatacaaaccgaaaccgaatagataaaaatctgaaccgaattgataatcgaatggatacgaattgataaccgaatggatataaaccggaactatcatttggtatgttttttgtttttgttctctcaattgttaaatcacactacctagcattaaatatatacttttgagacacgtttgatcatttttgactagttagtcacacattgatataattggtttcttaattcatcatagaaagtaatctgtacgtatatgattggttcattcgcaatccattttatttggttatcggatgggtcatcaatggagattaacaaggttttgaaatttaattaactagacttggaaattgaattatttatttcccccggataagacacaaatttgacaaatatggataaagcacgttttgataatgtgtattcgagctgtttaatttgaaccacgatgtacatatgattcatcagtcaatacataatatttatactactaatacacaaattgtgtgcaatatcgtattaataacaataaaaatggaatatatatatacttaggttattgaccaatattgacgacaaaaatttcaaatgaatgtatatatattcgtcattagtggacgaggaaggcaacttcgcaggaaatgatattgcgagcttacatacaaaaaatataaaggccacatggttttcacgtagctatcacacttaaacgtgattacgtgacgtaccttgtttaactaacgtaaccttcatggtcttgcttttttttgttcataattattatcttcatggtcttaccacgttctttgaacgtttcttaactcttgacttctaatcagtagacaaattattacacattagacacatcatatatagacaataggcacattattattgtatgtagtgatcaaaagttcatggtaaatcttttgaattagtcaataactgtagcctaaacattaaaaacaaagattcaaagctacatatttccgactgacttttaacattgtacggatcggaccgtcaagttgatttaaactatgattagtgatgatttatggaaaccctctctaacgtacatgtggagatattgtgtcagctgttatgtcattgtttatagctttccaagttgcaaaggagaccatcattttggacttttttctttctttcttgtaacatctgttaagtatcactagctagacacttgctattaggtccacaacctcgttagtggacggaccagaccataattaagaaattagacacgagtgaccgtagtataaaagattaaaagtgagtttagaaatgtacctgactagtacaatttccagatttcatcgtgacataaaaggtgcatctaaattataaatgatggataataattgtcttaagcatgcaccgttaattttccgtgatcaacgtaaaaaagtagcaatcgagtaataatatagtaatgcaaaagacaaaatgattatcgcaaataattaaccaacccattaagcttataatgcatgcgtattatatcaatcaaatcaaagcattaatatggtccacaagagtagaagacttgtaccgcgcatccgcatgatgttgttaagttgaaaattgcttacaaaagtcctgtttttttcaacctagaatccatttcccacaaaagttagcacttttatcactgttattttccttttaaatactagcgaccctcgatataatctaaagaacgttaggtatttgtaaaatacaattttggagtttatggcatatttttctttcttacctccgctttattattttgtcttgttcatattttagcgagtctaagattttgaatggatgcagcggacaaaacggtttaatttgtctgctattcagtctacttcatttttgggcggacaataaatcgatgcggatcaaatttatttatatgtaaaaacggtccgtagatggtccgttgcggttttcttctattattttttatccagaccactgcgtactataattaatgaatggtaaataaaaaaaggtttgatccattgacgattttgtccgccttaaccatcataaccatccaaaccctaattctaaaatttcaacgtggcagaaaagaaggtaattgaataacaaggtgatatactcttgaaataaacatgaatctacaagctatacttaatagttgcatgtgatgcgcacgagtaccatcttgttgaaatagtggtagtacaatttaagagaaatccaaatactaattaaaaaagccatcatgattaaaataattaggcttgaaatcgtacgtagtcaaaaggtttgtccattaattaagaaattaataaaaatggaccatcatttccacgtatctacaaatctctcttacccccatatgcacatgtctgcgaaccccatcatttaaagccccaacgtagcaacctcaccgccttcaatcatcaaacatccaaactctatcctttcgttttcttgtcagacaaaaactaatactagatgggtaacagtttaggcggcaagaaaacgaccaaagtcatgaagatagacggcgagacttttaaactgaaaactccggtgacggctgaggaggtcttaaaagactttcccggccacgtcttgttagactccgaatccgtcaagcactacggtgcccgagccaaaccacttgaggtatgttttttttttttttctatcagaactatatgttatgtttcttgttaaactatacgaatcatgttttgatagacaaagcgtttaatgttgtttggtgtgcaggcgaagcagaggttggaggcgaagcggctttattttgtggtggagccggtgaaagagtgtccaccgagaagggtaagatcaggaattcacgtgagtgcaaaggagaggcttgagagtctcatgctggcccggagatcgtcttccgatctctccatactcaaaccaccaggaggatggacgacggaggaagaagaaggagcggtgaggagggtgaaggtgaggattcccaaagctgagcttgaaaagctcgttaaagaaggagccaccgaagccgaagctacgcagaagatcgctgctctctttatggccaaacagaggcaagaggaggcatatcagaacacacgacaggacgagcccgccaccacggccaccgccaccgccaccaccaccgccacaagaggagtcaaatcccgtttggtgagttccttaatttttctcctccatttgtttgtttttttcgtacaaagtaaataagcaaaaatattttaattacattagagtggcatttagctagtcttgactttaataatattgaaattttttcactttttataggaacttttttgtggtcaaattttgcatgctaacacttttatattgtttcaaagatataggacaaaatttattacacaacttttgattttgtctttcaaataatcatttaaaagtttcattctacaacaacaatggtattgatatgtttagtaatgatgttgcagaaacgagtgagtttcatggcggaaagaggaggagggagcgagatcactgtagcttgaaccaataaacatatgtattagagaatgcttcccaacgtttctgcaaattctatgtacataaaaaacgcagaaagtttgagagaaagcttattcagatattcatccatgtctccactctattgtactcaagagttttactattattacattgtagaagaaacagtcattttataggcagattcattcgtttgcctctcaccttattgattacatgtttcccggaaaataaaaagaaagtaagtatacgaggaagacgatgttctctatgctcgtttggtccttcttcccacctcgagagccaactctgtatcgatcttcagagatatgtctagtgctttcaccgaatgcgtaagagctccactgcattcatatgatctttcagttttcagctgaccaaaaaccaaaacatttgtatcaaaaacagatttcgaaagtattcttacctgctaatgaatgtaactccactctgtccgatcttgtgtactgtctcaagtgtaacattgcctgatgcctacatcatgagatttagagtctgagtttcactaaaagaaatctgttatctctctttctaactcacacatacctctgtctcgaatctcccgttgattagctctaccgcatctttaagcattgtgacatcgacatctccattctctaagggcacaaccatattatccagcattattctcgtcaaccgagtctcggatccactagcatactctaacacttccttcacttcctcaagcgtcctcgtctccacctttaagtaaagatatatagtgattacaacttgtttgccatttaacttgcagccacaaaacggtttgaaagctttagattagttacctctacatccatttcgagattcttttgctttagatattcgtctacggatttgacggcgtttactataccgcctgcagctgagatatggttatcttttatcatcaccatatcaaataaccccatcctatgattcctccctccaccaatcagtacctaagctaagcaagaaaacttgaggtgtatcataatcctaatattccaaagatgagacaaatatagcaacaaatgtgtctcaactctcaaaggttgggtttgaaataggtataacagtagtgtggaacgtaccgcccatttatctaccaaccgcaaaccaggagcagtttttcttgtctccagtatacatgcaggggatgcagcatctgccattaactgcaggaaacagactcatcagctggacaaagttcactactaacactgtactataaaacgaaataaggaatggatactgttgagttactataaaccatgtactaagccaacaaagccttgtcattataagatataagctcactaagttaatatgaatgcaaccacaccaatcactagagagaatctatagagacacaaaaaaaagaccttggtaagggttgcaattccactcatcctctgcataaagttgagcaaaactctttcagcaacaacaatcttatgtgcattccctgatactttcccaaacttcaatcctttatgaacataatctccatcctttcgcatccattcaacctgagatattagaaactaaatcacttcaagctaaaagacacatacaaaacaaatcaaaagacttcaagtaagatgatggaaacaccttcaaggagggatcaacatgttcaaaaatcatgtcagcaagagcaactccagcaacaataccatcttccttggccaagaaataagcttccacttccatatcaaacggtatcgtagccatacacgttacatctccttcactcaaatcatatatttttgaccaactcaatttcacaaattaaaaatcgaaactttagaaggtgaagagagaacctgtatgaccagcatcttcagctagggctagtttgataacagctttcaaatcgtaagtagggtgtgaaggaggcttgatccccattgaaacttctccggccgtttgagtcgctgaagcagacatttttacgaagctcctgaaacaattgagattgagtttggtcgccacgattacagaaatgaacaaaggagagacttaaaagattgggttttgtcggataaaaccttggaattgcgtagaattgaggcgacaagaatcgagagacagagatcattgtagaactgattcaactctgtttcttgttggtcttctttgtgtgaatataataaacagctctcagagaaagaaatgatatttgggtgaaccaacatactattgggctccctaccaaaaaaacatactattgggcttttatttgtgaagcccattccatactaacgtctgcattttagttaaattcaacataaaacataacactcaaacatgtaacaagtacggagttctaactcaaaacatatactcttgtgtcttgtgtgtgttttctgttgtgtaatatatttctgatttcgtttgtgttgctgatggcttgtcttagattgtggagttcattcatgtcttactgaaaactcgaagtgaagcaataggaaaagaactagctagctcaggagctattagaagagtccttgatctgttctttgagtaaatacactccctggatcgattacaaaattttaaactgtttgttattcctgcttggctaaattcatctttcaattgtttactccaactatgcaggtacccgtatggtacacctctgatcaaacatttatggcttcttgtcacactattgatgcaactatcagtcgtgcagttacactttcagaatatttgctaggttgtcttagtaaaagcatagagatataataggaaaccgtccaaacacttttgggtttgacaatagttggcacagtatctagtactgattttgtctcttaatgactactaatagttggcacagtatcttggttatttacttggcttcgttggctcttgattggagcttggaaatgggaattcatcttgagaagtcagcgtatcttgcgttagctggtaactttctgagatcaaacgagctctctaaagtgattgatgtggtcaaggagatggtgaaatcccaacactcgcttggtgtgtaccatggagcaatgctgatccacatgctcgggtttgggagaagacctagcttagctgcagaggctttagacttacttccggatgatcaaaagggtctatctgcttacactgcgctgatggatgtttatatctcagcagggagtccagagaaagcaatgaagatattaggagagatgagagagcgagagataatgccttcgcttgggacatacgatgttctattgtctggtcttgagaaaaccagtgatttccagagagaaacatcgtcattgaggaaggagcagaagagtcttgttgcttctacacgtttccgggaaattgttcatgttgaagacaaaatatgcatgtgatcttctgtttgcttgcaagatagacaaaatctgttgcttctgtttgattacaaaatctgtgatctcagaaacattgatgcttgttgaccctaagcaaagtgagaggtatctaacaagagtattctgaccaaaatttagaccataaaccttgaccacaattggatgcattaaaatttaatctgccgttcttccatagtgtttttaacaacacaatccaagtatcaaaaaccaataacaaaccaaatagaaaaaacagactcatatgggatggaaatgaaaaagatgcattaaacctctaattcgatacttgtctaatttgttgcttcaatgatcatagagttgaccttttgcaaaaaacttgtctttagccgtaggttttcagattcttcatctttcaacagcttgaacttctcttcgacctccttcttcgtctctatcggaaccatgctccaactctgtttcattacgtcttcactcacccctaacctcgcaattgatcctacaagataagaatttacaaaccaatctcctacctcctccaccttagttgtaggttcccaaattactttggaaagttgaaaacatttccggtcgtgagcatttacaagagagttctcatctacaccattgttccatttcttgaggaacttgtccttcaagcgacggattttggttgtgaattgatgttgattcgcttgaaagctaatgaagttcttcaccgtatcaataaaaccagtcatatcatcataaggactcttccctttatcattctcaaaatcaaccatgccttgcagcaaaacaatctcatcatcatcactccatattctttgaaaataattctttttggtatctgttgacaccatctcatcatcactcgtcttggttacaacaactgaaacctccttctccagcgaatctgaatcagagtcttgacgcctcttcaccatcgatggatcttcctccggtttgagacgcttgttcgtctctcgatgaatcttcctccggtttttcttggccgtcagacgtttgagagagcgggagaccaaaagtttttttgttattcctttcattttttttttcaagataaaaaagttgtagagataatatcagaataaagatcttctatttatatagccgcttagcattagggttaagtgtttgacaaaaaaaaaaaaaagcattagggttaagtaattgtggctacaacttccaaaaagaagggctgtcaagttttgtatctaatgtcactaatgatcgatcatttgtcccaatatcaattttttcttctgtttggctacaactcaacactccttcacgaactagtttgaatggaggctgtgacattatctttgtgagtttctaactctgatggaacctacaacaatcatgtcagtgaagacccaacccaaccggttgctttatgcatattcagtttcaggacactaagtaccattttacagaagagatttttccatatatatgaatctcacctttttcattaaggtaacagcagagaaaatgggtccttgggttctatgactggtggctatgtatttacaaagagcgttttccatcttacaaacgtgtaggcgacaagcaaaatatggtattcaaacaacactgactagaacaacttttaggtgaatccacttgccttgcttgattcgccaaccagttctaaaataacttacacgtacatacttcctctgttgtgctaccatattcctaataataacgccaaagagcaaaatgataagtacctttgtgaaacagtacaacttcttgtcctttccttgccacaatctccaagctagtacgtactctcttgacgtcaacaagggaaactttttaatctcaattccgctattactatcaacctgcaactgacagtcttatcccatagttttctataatcattgtccatgtaaaagtccctcacaatctccctcaaataccgtgacacttaggttacttcataggaccaccaccatcctaaaaatagagcctaaggcttattcatactcagtaatcagaataataaagacactttttaagacgatttaaaaaaaaggactttgggtttgcagcgatcgttgcttttgtgaataacatgttcccatatctccgtggaatatcatttgtttccccctccaaattctcgatcagaaatttcaataaatgtgtgcaaaatttattagtgtatgacatatactagtgtaaggtaggtaaacatgtaaataaatgtgtgcaaaattttaataaaataaagaaattgttctaaataggctgctaaaactaaaatgaaggcactaacaaaattcaacataaaacgtaacactcaaacatgaaacatgtacgtaacaagtaaagagttctaagtcaaacaattacaagaagctgcctcgctctttcgtttactttgaatatttcacaacaacattcaaataaaaccattgtctctctccctctccatgtatctttatatatttcctccatcaaaacttttatctctcatccttcttaattccctcaaaagattcattattagctaactcaacgtttcctcatactaatcaaccactagaccattcatccccgcgttacaaggccgagttatcatgaggatcatgtggaaattcattatagtgatgttgtgttttatagctttggtgggatcaagaggaacatcggcaacgtcaaggctgagaatgaagaaggaagatataggtagaaggtttgctttgcagaataagctccaacgaggtccagttcctccttcacagccttctccatgtcacaacaaactaaaccctctttctcattcacaagtttattcttcccacacttatgttacttgcccttgaagcttgatcaaccacattcttttatttattgtctctcttctcatacatatatgtatccacgattcgactcctccaaactcgaaagagtcgaaattgtaataccttttggacataaattatacaactctttgtgttatttaaccatttgatcattaactaactaattcacacaattttggtgccaagtatttgtttttgtaacttgaaaatttcacaagaagataaaagtggacagataagcgagtaaaacacaagtcaaattaggcgtgggcataataactgaaccgaaagaaccgaaccggaaccgaagcaaaaagaaccgaacccgaatccgaaccgaaatggtaaaatacttaaatagatcctaaattctagaaccaaaataataggaaccgaacccaaaaatattttagatatccgaaatatgattatattatccaaaaatattagttatttttagattgaataatcaaaaatacctaaaataccaaaatatacttgaaaatatatatataacaccacaatatccaaaaaaatactcgaaaatatccgaaatatctgaaataaaatatccgaatagatcccaaacttcataaccgaaagaactagaaccaaacccgtaccaaactgaaactgtttcggttcatatatggattctacactcaaaaaccgaaggaatcggaatccaactaaaaccgaagcgaatacccgaacgcccaggtcctaagtcaaattataaaccctaactttataattgtggttaaagatttgcttagatttttgaatttttttctttgaatctagatttttgaaattttacttgaataaaaaacggcgtcttattcaaacaaagctttctaatacactgcaaggttggagtttagaattggttatctctctgggcaaagcttcatgcgcttctctagcatcttccgcaataccccaatccaattctccaatcgccggagctccgtcaagctacttcactctcttcctcgtctaaaacccaccaactccaagcgattctcccaaaaacccaaacttgtgaaaacacagaccctaccagatcccagtgtttacacaagagacattgtatccaacatctataacatcctcaagtactccaattgggactctgctcaagaacagcttccacatctcggcgtcagatgggattctcacattatcaaccgtgtcttgaaagcacatcctccgatgcagaaagcttggctctttttcaactgggctgctcaaatcaagggtttcaaacacgaccacttcacttataccaccatgctcgatatcttcggagaagccggtcggattcaatccatgtactctgtttttcaccttatgaaggagaagggtgtgttgatcgatacggtgacttatacatcgctgattcactgggtttcaagctccggtgatgtggatggagcaatgaggttgtgggaggagatgagagataatgggtgcgaacctaccgttgtgtcgtacactgcttacatgaagatgcttttcgctgatgggagggtggaagaagccacggaggtgtataaggagatgttacggtcgcgggtttctccgaattgtcacacttatactgtattgatggagtatcttgtcgccacaggtcaacttcattctcttgcacactaagtgtttgttaaaatgcttagctgaaaatccaaaacttttgctttatgtagatgattctggtatctgaatgttttgtagccttgttgatgatgatgtgttagtttcttcgtttgattttgcaggaaaatgtgaggaagccttggacatattctttaaaatgcaagaaattggtgtgcagccagataaagcagcttgcaatattctgatagcgaaagccttgaaatttggggaaacatctttcatgactcgagttcttgtgtacatgaaagaaaatggagttgtcctacgctatcctatctttgttgaagctttagagacactgaaagctgcaggcgaaagtgatgatctgttaagggaagtcaactcgcatatttccgttgaatcgttgtgctccagtgacattgatgagactccaacagcggaagttaatgacactaagaattcagatgatagtagagttatcagctccgttctcttgatgaagcagaatctggttgcagttgacattttacttaaccagatgagagataggaacataaagctggattcttttgttgtttcagcaatcatagaaacaaactgtgaccgttgtagaacagagggggcttcgttggcttttgattacagcttggaaatgggaattcatctcaagaagtcagcgtatctcgcgttaattggtaactttctgagatcaaacgagcttcctaaagtgattgaagtggtcaaggagatggtgaaagcccaacactcgcttggttgttaccaaggagctatgttgatccacaggctcgggtttgggagaagacctcgtttagccgcagacgttttcgacttacttccggatgatcaaaagggtgtagctgcttacactgcgctgatggatgtttatatctcagcagggagtccagagaaagcaatgaagatattacgagagatgagagagcgagagataatgccttctttggggacatacgatgttctattgtctggccttgagaaaactagtgatttccagaaggaagtggcgttgttgaggaaggagaagaagagtcttgttgcttctgcacgtttccgagaaaatgttcatgttgaagacaaaatatgtgatcttctctttgctacaaatctgttgtaatctggttgcaggtgaaagtcaacatgtacatgtttaatctaggcccattaaatatgaggcctatactgtttttaagcccattactcatcattttttattattatatttaatttaatttcttcattttattgacatttctgatagattagcggttgctactgacgccggagaagagagatggcgagatcgtgctctatctggacacctgttttgatctcactttcaccagtgaccggagaatcacctaaaatttcacggcgccgggtgattttagccacaagtataggatctcctcaggttcgtacaagtacaacagctttcgaagatccatatagttagttttcttttcgtggagaaatatgttgtgctatgtgtgtcaatgaattcgtagccttttaagtttagattgagctattagagattgctttctcagagattcagctgttgagattttgattcctttttaagcctaaacttgtgcagataatcttttcatttgtatggtctgacagatttatgattgcttggtcaatagaagaagaagattaatattgagtctgcattggttttgttagttagtgtatatctctgaagtcagtctcttatgccttgtctttggcagcctttacttgaagcaaagatcaaggaacctcagaagcttcaagtccttgattccaaagatgtttccagaagaaacactatgctgtatctagctgctggatttcttggagggatcaactttctcaatggtgaagccgcagaagctcgagtagggagaaaggagaacagaaagaaagcattggagaagctgagggccaaagctaaagagtcagagcccaacaacaagtcaggtaaccaaaagatagagaaagagttagagaaagaagaagtgtttcctctacttcctccacctcttgtcgttgaagcaaacttgctacaataagctctctctctcttttagctacacaaatgtcagaatcaatacctttgatttcaacactacatgctgttctgtgctaggtttcctactacaaaacgtgtaagatgatgaaatacacaagtagagaagagctaagtgatcttcttgtccatgtttgtgatgagcttcttcatctgaaatctccagaaacagaagtaagcgaagccaaatccaatcaacacatacaaccaaatcttatcttcaccaccttccttctccgaccaaacctcttctataccaaaccattccctcgctccttcttctttgtaactacttcccattatcccctccatcactctcccatacaacacatatatcctatcccgtcccgcaaccgtcaccgcggtcggaaagccctcgatgtcgaggtcaatttcgtcgtaaacaactccttcgctccagctatcttggcttttgagtaaccaaagcttcttctgtgacaccaccatgactgtgccgtctctccgtctcctcgtcatcccgtccgccgcaatcagatcaccgtttaacaacaccagcctcgcattcccgctatcttcgtcaactttgaataccttccctgtgttgctctgcaccaccaggagatagcctttgctgatgtacacgatcccgttcaagccgcaatcgcggaaacttgcgtccgcgtctgccgccacaggctgcgaattgaacaacggcgatttggagaagatcgaagctgcgccgtcgcgatcgactttccagatgaagtttttggctgagttggtgacgtaagcgttgcctttgaaatcaaccgccacgtcattggcgacatcacgagcgatgtcttcgtcgtctccgggaagagacgggagaggagagaggaatacacgacggcctccgctgcggagatcgtaggaggctagggcactgaagggagggagaggcggcaaactctggatacaggcaaggagacggcgattagtagagtcaacggcgagaccgaggatagtggagttctccggtagatcgagatcggagattagggtttcgatgactccagcgtcggagacggaatgaattgtgcggctgtggagagaaccgactagaaaatgctggtcccttggatcccaggttagtccctccgggtagagtcccggcgatcggaagttgataacgtggcggttatcggcggaggagggaatcagaagtcccaggaacaagacggcgaagagaattgggaagacgaagaaggatctgtatcgagtggaagacgacgacgacatgttcgctttcatctgtgatttcgatttaggaaaataatgaatggctcatttttagaaaaaataaaacttcgatgtataaaaagatatgaccaagcccatttatgtaataaacgggccacattttgcgtgtagtataaaatagggcccataaagtttattggccttccttcatttgctgtgttgatgtcaaaaagagaagagtagtgcattgctgttttattggcagctactaatgatttggttttgctgatgggctcttaatagacgtctctccactataccctatacttagactatcagggcgaatcatggatatctttgttactgtaatattcttaaatataggcccacctttcaaatcttgaatcaatcggtcggctttttaggcccaaataaacctttttattactagaccaaaatgaaaaaaatgtcaaaaaaatcataaatttttaaatttgaagcggaaaaacgtaaactttcaaaatgttattaaaattctaaagtttagtttgactttattataaattagttaaatttgattgattgggtcattttaggcatattgataaatttccattaataaaaagatgacatagttaacttttcgtagttaacttttcgtaacgtttggaaaatcttgtatgaggtataaatcaggtatggtgaaaaatcaattttatacatacatatgaggtatcgttaaaaagaaaaactagtacaatgtatggtgaaaaagcttgtaaagtatctttctaaatacatataaggtattgttataaacccaaacgtaacggaaaattaataaagtaagtgatttagcctcctagaaaaatacagtacatgatggaacacatcatgctttgaggtggtacgagagccattgataccgcgaccaagcccggtcatgacctagaggcgaagcccatcaagtgctttaggcagcaaatatatttaagttttaagaagctaagcacgaaattttgaaaaaatcatataatacaatggttattttttcaccttttaacattttttgtatttgtttttaaaaaaccaataattttttggaccggtcctcatcgcgaccaatcaaataagcttattctgataatgtgttctagaaacgactaaatcttgcaatgaacctatgagcgagatacattattatgcagaagattgaatatagtcaatctattcaccccataagctgatgagtgatgacccggtaacaaacccagtaaaaagtaaatactaagattaagcattttatacctcaaaaatgtgagactagtctaatctaatctcaaggaaagtaatattctaaggctacaaatattctactaaacaataaaaacgtatgcacctaagtttgcttcttttttcccttatttacaaatcaaactcatctaacttgaacgacataagttcatcagttaacattatacgtatgtgcattagaatgataaattaaaacaaacaaaagttctatatactagacgatgttatggccaccacacgagacatataaggctttagtacttggtgttttgtagtttgtatacacacgcatggatttgttatccataagacattaaattggaaatgatagatacgtacgtgagatgtgaatcttatgcatgttatgcaatttggacctttgcatctaaatgtaaggagaacgaccctacgactagaccagtgttcgtggttcctcatacattgcccatcacctttctctctcaatacccccattaattcatctttattgttttattcgatttatatctttatcgattgtgctttttgattttgtttcaatccattaattcaaagcatttcatctcacagattaaagagtcatattattagatactacaacaaagtagacatacaaccccggaagtatggaaatttgttgatagttatgattcctattagtatccactctaacctcaaatatgaatttttgaaaatatgaaagttcagaaagttcagattcgtcgatggcactagctctaaacactaagagcatctccaatgctcaactctattttttcctctatttttgagttgattttattttagagaaaatatagttgattttgctgtattgtatgcctctaaaatagaggaaaaatgtagatatatttttctctattttagagaattacaatggagcaaaatcaactatatttcctctaaaatagagttagtcattgagaatggtctaagtaattctgagtgaaacgtgacgtctatgggtaaaatattcttgatttgattagtaaatttatcgaaacagtaactaagagttaacgatttatagtcacaattaaatcagttaaaggaatagccagctgctactttcaaagtgaatgcatgatcgaagttgttcagttttgaaggaatgaaaaaaactttttggtgatattatcgatactatgtgggaatatgataaacacaatattttgactgttgattagttccacgaaaatatgataaactcaacattttgactgttgattagttccacgaagatatacatgttgatataatcgaaaatgtggtccatgttgttataatactttgatgctcgaattttgatgttcgaaacacacgtgggaagtttttctttttccataaaagtttgaactctataggtttaaaaatgtatagttcaaaacgaatcctttagaatttcccaaaataaaagaactcacaacttctatgggcatatagataagaataagaatatcggggcatgtgtgtaaacgagtaacacaacaagttttacttgcaaaagatataatatggcaacttttgtcgtcaagtgaaatgcgtcgtcgctttcgggcgaagcctgcatgttggtccatcttagattttgcattccattgaattttcttcacatccactctcccattagttttgatgttagtttcggaatatttgctttgttttctatatagtatattgatgcctcgttaaattactacttgttggatgagtaatcataccgtatttgaatgaccaatcctaatacgaaaatcagatgatcaattcataacattaaaaatgtttgaaaaatgagattcacactactttgacattataaagactacgtttgatagtctcgggaccattttttctataaagggtggtctttagattcatgtgcggaagttcacagaatttgaagttaacataaactttttgagatttttttctgctagagatcgtgtattcttaaaaaaacgggaccgtaaacatgcatcgtatgatcataggattaattaattagagattaggattttgcttctgtcgtaaaacagtgtttgttatcaaggaatatgcttaaattaactgtaataaaataaaattactgtcttttgaaacttttgcttctgactgttcagacctgatttctatcattgacaatcaagacgattgaccgacattcgcagcggaattggcatcctatcgctccttagtttgttttttcctttctttccgtattagatttttttctcgtagttttaacactcgaactgattgtttagctaaaaaagctcggggtagaaataatattttctcctatgtaagcataatggttcatgaatggctctctctagcggagaatctcttcccgatgaattaatattaatggtatttgtggaaaaaataaatcagtacgagggtgtatatatatagtataggactatttcaatccaactcataagctagtttcagtataaaccacttaactagaaacttcaattaataaaaaaaggtgcatattacatatctgcttagccaaaatctacacataaattaacaaaaacagaaaatgaaaaaataaaggtaaggaagagagattttttcttcttggcgtctaatgaagacaagatccttaatccattcaagtcttgttcactaaatcctaagtacttttgttgtgttccacaaatattggaaccaaaaaccaaaggcatatcttcttcttcaccttccactctttcccacgaaaaataaaggctttgcttatttcctcgttaccgagaaataaatagcccaatctccgaggctctctcaaaagccagttgatactgaagggaccaattcaaaggccaagaagaatatagtagaccagagttataggtaaggctattaacattccaaatatgaccctgcatccatatttttcaccatcattcacacatttgttaatatattgtaagtttgtaacaaaaataaaaatgtggctgtaacataaaataagtttggaacttacccagtgcttagaatcgtgggatgcacattgtactcttttgcaaacacaaacggaactattccttgaggcaacgcagcctaataattcatgcattcatcaacatcatcatcgtgatcatgtaatatttataatagacctagctatatcatgtaacgttataaatttgtatacctgaacgatggctatacggagaaggtcgccgtgtaagccaatggcaatcccagcaacagccatgatggccggaccggttataaatctgaccgccatggcaaacgtggcgacagagttcccacaagcaatgattttgggttgaagtgccatgaataaaccttaaaattacaccaaaaataagcaattcattaactaaaaggatttgagaaaattgacagcaaagagttaggtcatctacttggtgagacccaaataagtagacagagccagtggggactcggcgtggggaccggacacaccaacatgtctgggtcagagggtcaggattctctctttgggtaagtgctttgtacagtttatatgacttttaccaattacaagctggacaactacgactaattaaacacacagacccactttgcattaaatgaatcttttttaacagataagatgagaacaaatttgaacccaactttaaagattagatcatcatcaaaacaagtctagatttgcatgaagcaaggttagtgtttacctaagctgaacatagccattccaagaccagcatctgagagtatggagatggattgttgtaatattttgggcatagccacatgccacctgcttccaaaaacaacccatactcattattagttcccactacaattattccatgcatagatgattatattatttccttttcttattataacatttatccataaaatctgtaagtaagaaaatgattggactcactgaccggtaagcaacaagagcccatatgagaccgattagactggagtacgtgtttgggtttctgatcagctttctccacaccattatcaatatcagtcgtgtcatcacacttgtcggcggcatatgtgttccgttgttgccgccgccatctccaccagccgcctctagctccgccgtggaattagaccccattttattcagccctgctgtagctttctctatctctctttctccctctccactatcaagaccgccgatatcatcaccaccacctgagaaaaccaaaaatcatgaatacatacaaaaataatagtattcgaataataataaaattaaaccaacaaacctctagcatattatttatgtaaacaattttccgcaattttagctaaataatatttgatgacaaaaaaaaaaaaaaaaaagaacctctagcattactctttcgaggttgatcagagacaaccatccgaatctccttagcaccttgttcagattgttccgttgccacgttgtcgcctgcacctccgccaaacacgtcggagaccggagaagcgcttgagctccaaacaaacatgtgaagctccttagcgtcatggctcgctttgctatctttctcttgcagttgctgttggttttctttaggaattttattcggtttagttgaaacacccgtaccggttgaaaactccgggttcggagccgggtacgaaccggccgccggaacagaactgttagtgttattgtaaaatccatatttaacggcgttgttctcttcgaagttcgaaggccgtggagtcggaccacgagaagattgaacggagtacaaatccgccggaccaaaattcgaaagcctcccgccgggaaaccccataacagagtaaaaatcagaatggttaaagttagaacctctcggagtcgaactaagactatagatctcagctccggtaagattcgaaggccgtggagtcatcatcagtgaccgtctcgatgcgtttgatttcctcacggtaacatgaagcttcccgtcgtttcctatctcagcatccgtctcaagaaaatcatgaccgtcgagagaaacgacgtcggattcaactttaaacgaaacaatagacgcaccagtctccgggaactgctccataataagaagcttagcgccacggtactcgaagaggaagagaaggagagtgtaccaaatgatacactgaagaacaacgacttggaccattagagaacctgcgtaggttccgtacatggcgatcaacagagggatccccatgacaagagtgtttgggagagtgctgagagagaagattgtgatcatccactccaagctaccgttcttggttaggttagcccatagagcaagtaagacgagcatgatgattttttgaagcgtgtcggcggcgacgaagcggaaattcatggcgtaaggatcgttggtggagatgaagtggaaggagaggagagggacggcgaagatagcgacgaagcggttgatgccggagcactggtctggtgagaatatcttccaccactgtacggatccgtaggcgagaatcatagctacgtaaagtggtaccacggcggtgaggacggtgtacaagtcgtgccacgtaatcattttttccggtgggttttggagtttagtgagaagacagtggcatttgagggggaattagaaggaagaagaggggtagaatgggaagaataataaagaaaccgttaagagagaaaagtacagtaatgatttacaaggattcggtgaagaggactaatttatagaggtttttgaggcagtgacagtgtcatcatcatcatcagcacacgattacgttttttaagtttgattaataatttgatttaaaatggctttgtgtgtagttgagtggggacacgtggcaaatcgcatgtggggggagttttctggagggacgtggacagttttatggaatagtcgtgcttttttgctactatcttattacgaaaaagtggtcttgtttttgcactttttgaaagttgcaaaaggaactttggcgaatactacgaattactgtatctgtgatcgtttttcttgtaaatgtaatttgagttttgattccaaatagaatcaaactattgtctacgtacttggtacaagaagacagccacataaaaattacaagaagaacaaatgtcattagtgttaggtccaagccactgttggaccgttgaattaattacacacatttattcccttttcaaaaattctcacttgctatgactagaataatattttgttttttgtttttgttttgttaaacttgtaaatatcattaaaaataaaatttgaggtattacaaaaaaaatattacttatagttacttatattacaaaaagtatttacaagctcacatctcgtcattttctcactcttaaaattttactctcccttatctctaaaacttcagccgccgcctgcgtttagggttaccggttccggtggctttctcagcaccggaaccgaagtcttttgttttgctcttattctatcttttttctttagacacatctgagagatttttttccaacggttgtgaatctgaattttcagatctagatatttaaagtctaaaactttttctttttaggtttttgctgtttgtcttttgtctttttcaagaacagagtcagatctggccgatccatccaaggcagaagcgtttctatccaaattttcgcctcagacttctgaaattccacctgaagatcccgatctcgttctctccttcatgaggctctcactcctttgggtctctggatgatggttttatctcatcgcccattcgtgtttaggttgagttaagtgaggcttctag

SEQ ID NO: 148 - DNA, 103125 bp, Arabidopsis thaliana
gaattcagatgatagtagagttatcagctccgttctcttgatgaagcagaatctggttgcagttgacattttacttaaccagatgagagataggaacataaagctggattcttttgttgtttcagcaatcatagaaacaaactgtgaccgttgtagaacagagggggcttcgttggcttttgattacagcttggaaatgggaattcatctcaagaagtcagcgtatctcgcgttaattggtaactttctgagatcaaacgagcttcctaaagtgattgaagtggtcaaggagatggtgaaagcccaacactcgcttggttgttaccaaggagctatgttgatccacaggctcgggtttgggagaagacctcgtttagccgcagacgttttcgacttacttccggatgatcaaaagggtgtagctgcttacactgcgctgatggatgtttatatctcagcagggagtccagagaaagcaatgaagatattacgagagatgagagagcgagagataatgccttctttggggacatacgatgttctattgtctggccttgagaaaactagtgatttccagaaggaagtggcgttgttgaggaaggagaagaagagtcttgttgcttctgcacgtttccgagaaaatgttcatgttgaagacaaaatatgtgatcttctctttgctacaaatctgttgtaatctggttgcaggtgaaagtcaacatgtacatgtttaatctaggcccattaaatatgaggcctatactgtttttaagcccattactcatcattttttattattatatttaatttaatttcttcattttattgacatttctgatagattagcggttgctactgacgccggagaagagagatggcgagatcgtgctctatctggacacctgttttgatctcactttcaccagtgaccggagaatcacctaaaatttcacggcgccgggtgattttagccacaagtataggatctcctcaggttcgtacaagtacaacagctttcgaagatccatatagttagttttcttttcgtggagaaatatgttgtgctatgtgtgtcaatgaattcgtagccttttaagtttagattgagctattagagattgctttctcagagattcagctgttgagattttgattcctttttaagcctaaacttgtgcagataatcttttcatttgtatggtctgacagatttatgattgcttggtcaatagaagaagaagattaatattgagtctgcattggttttgttagttagtgtatatctctgaagtcagtctcttatgccttgtctttggcagcctttacttgaagcaaagatcaaggaacctcagaagcttcaagtccttgattccaaagatgtttccagaagaaacactatgctgtatctagctgctggatttcttggagggatcaactttctcaatggtgaagccgcagaagctcgagtagggagaaaggagaacagaaagaaagcattggagaagctgagggccaaagctaaagagtcagagcccaacaacaagtcaggtaaccaaaagatagagaaagagttagagaaagaagaagtgtttcctctacttcctccacctcttgtcgttgaagcaaacttgctacaataagctctctctctcttttagctacacaaatgtcagaatcaatacctttgatttcaacactacatgctgttctgtgctaggtttcctactacaaaacgtgtaagatgatgaaatacacaagtagagaagagctaagtgatcttcttgtccatgtttgtgatgagcttcttcatctgaaatctccagaaacagaagtaagcgaagccaaatccaatcaacacatacaaccaaatcttatcttcaccaccttccttctccgaccaaacctcttctataccaaaccattccctcgctccttcttctttgtaactacttcccattatcccctccatcactctcccatacaacacatatatcctatcccgtcccgcaaccgtcaccgcggtcggaaagccctcgatgtcgaggtcaatttcgtcgtaaacaactccttcgctccagctatcttggcttttgagtaaccaaagcttcttctgtgacaccaccatgactgtgccgtctctccgtctcctcgtcatcccgtccgccgcaatcagatcaccgtttaacaacaccagcctcgcattcccgctatcttcgtcaactttgaataccttccctgtgttgctctgcaccaccaggagatagcctttgctgatgtacacgatcccgttcaagccgcaatcgcggaaacttgcgtccgcgtctgccgccacaggctgcgaattgaacaacggcgatttggagaagatcgaagctgcgccgtcgcgatcgactttccagatgaagtttttggctgagttggtgacgtaagcgttgcctttgaaatcaaccgccacgtcattggcgacatcacgagcgatgtcttcgtcgtctccgggaagagacgggagaggagagaggaatacacgacggcctccgctgcggagatcgtaggaggctagggcactgaagggagggagaggcggcaaactctggatacaggcaaggagacggcgattagtagagtcaacggcgagaccgaggatagtggagttctccggtagatcgagatcggagattagggtttcgatgactccagcgtcggagacggaatgaattgtgcggctgtggagagaaccgactagaaaatgctggtcccttggatcccaggttagtccctccgggtagagtcccggcgatcggaagttgataacgtggcggttatcggcggaggagggaatcagaagtcccaggaacaagacggcgaagagaattgggaagacgaagaaggatctgtatcgagtggaagacgacgacgacatgttcgctttcatctgtgatttcgatttaggaaaataatgaatggctcatttttagaaaaaataaaacttcgatgtataaaaagatatgaccaagcccatttatgtaataaacgggccacattttgcgtgtagtataaaatagggcccataaagtttattggccttccttcatttgctgtgttgatgtcaaaaagagaagagtagtgcattgctgttttattggcagctactaatgatttggttttgctgatgggctcttaatagacgtctctccactataccctatacttagactatcagggcgaatcatggatatctttgttactgtaatattcttaaatataggcccacctttcaaatcttgaatcaatcggtcggctttttaggcccaaataaacctttttattactagaccaaaatgaaaaaaatgtcaaaaaaatcataaatttttaaatttgaagcggaaaaacgtaaactttcaaaatgttattaaaattctaaagtttagtttgactttattataaattagttaaatttgattgattgggtcattttaggcatattgataaatttccattaataaaaagatgacatagttaacttttcgtagttaacttttcgtaacgtttggaaaatcttgtatgaggtataaatcaggtatggtgaaaaatcaattttatacatacatatgaggtatcgttaaaaagaaaaactagtacaatgtatggtgaaaaagcttgtaaagtatctttctaaatacatataaggtattgttataaacccaaacgtaacggaaaattaataaagtaagtgatttagcctcctagaaaaatacagtacatgatggaacacatcatgctttgaggtggtacgagagccattgataccgcgaccaagcccggtcatgacctagaggcgaagcccatcaagtgctttaggcagcaaatatatttaagttttaagaagctaagcacgaaattttgaaaaaatcatataatacaatggttattttttcaccttttaacattttttgtatttgtttttaaaaaaccaataattttttggaccggtcctcatcgcgaccaatcaaataagcttattctgataatgtgttctagaaacgactaaatcttgcaatgaacctatgagcgagatacattattatgcagaagattgaatatagtcaatctattcaccccataagctgatgagtgatgacccggtaacaaacccagtaaaaagtaaatactaagattaagcattttatacctcaaaaatgtgagactagtctaatctaatctcaaggaaagtaatattctaaggctacaaatattctactaaacaataaaaacgtatgcacctaagtttgcttcttttttcccttatttacaaatcaaactcatctaacttgaacgacataagttcatcagttaacattatacgtatgtgcattagaatgataaattaaaacaaacaaaagttctatatactagacgatgttatggccaccacacgagacatataaggctttagtacttggtgttttgtagtttgtatacacacgcatggatttgttatccataagacattaaattggaaatgatagatacgtacgtgagatgtgaatcttatgcatgttatgcaatttggacctttgcatctaaatgtaaggagaacgaccctacgactagaccagtgttcgtggttcctcatacattgcccatcacctttctctctcaatacccccattaattcatctttattgttttattcgatttatatctttatcgattgtgctttttgattttgtttcaatccattaattcaaagcatttcatctcacagattaaagagtcatattattagatactacaacaaagtagacatacaaccccggaagtatggaaatttgttgatagttatgattcctattagtatccactctaacctcaaatatgaatttttgaaaatatgaaagttcagaaagttcagattcgtcgatggcactagctctaaacactaagagcatctccaatgctcaactctattttttcctctatttttgagttgattttattttagagaaaatatagttgattttgctgtattgtatgcctctaaaatagaggaaaaatgtagatatatttttctctattttagagaattacaatggagcaaaatcaactatatttcctctaaaatagagttagtcattgagaatggtctaagtaattctgagtgaaacgtgacgtctatgggtaaaatattcttgatttgattagtaaatttatcgaaacagtaactaagagttaacgatttatagtcacaattaaatcagttaaaggaatagccagctgctactttcaaagtgaatgcatgatcgaagttgttcagttttgaaggaatgaaaaaaactttttggtgatattatcgatactatgtgggaatatgataaacacaatattttgactgttgattagttccacgaaaatatgataaactcaacattttgactgttgattagttccacgaagatatacatgttgatataatcgaaaatgtggtccatgttgttataatactttgatgctcgaattttgatgttcgaaacacacgtgggaagtttttctttttccataaaagtttgaactctataggtttaaaaatgtatagttcaaaacgaatcctttagaatttcccaaaataaaagaactcacaacttctatgggcatatagataagaataagaatatcggggcatgtgtgtaaacgagtaacacaacaagttttacttgcaaaagatataatatggcaacttttgtcgtcaagtgaaatgcgtcgtcgctttcgggcgaagcctgcatgttggtccatcttagattttgcattccattgaattttcttcacatccactctcccattagttttgatgttagtttcggaatatttgctttgttttctatatagtatattgatgcctcgttaaattactacttgttggatgagtaatcataccgtatttgaatgaccaatcctaatacgaaaatcagatgatcaattcataacattaaaaatgtttgaaaaatgagattcacactactttgacattataaagactacgtttgatagtctcgggaccattttttctataaagggtggtctttagattcatgtgcggaagttcacagaatttgaagttaacataaactttttgagatttttttctgctagagatcgtgtattcttaaaaaaacgggaccgtaaacatgcatcgtatgatcataggattaattaattagagattaggattttgcttctgtcgtaaaacagtgtttgttatcaaggaatatgcttaaattaactgtaataaaataaaattactgtcttttgaaacttttgcttctgactgttcagacctgatttctatcattgacaatcaagacgattgaccgacattcgcagcggaattggcatcctatcgctccttagtttgttttttcctttctttccgtattagatttttttctcgtagttttaacactcgaactgattgtttagctaaaaaagctcggggtagaaataatattttctcctatgtaagcataatggttcatgaatggctctctctagcggagaatctcttcccgatgaattaatattaatggtatttgtggaaaaaataaatcagtacgagggtgtatatatatagtataggactatttcaatccaactcataagctagtttcagtataaaccacttaactagaaacttcaattaataaaaaaaggtgcatattacatatctgcttagccaaaatctacacataaattaacaaaaacagaaaatgaaaaaataaaggtaaggaagagagattttttcttcttggcgtctaatgaagacaagatccttaatccattcaagtcttgttcactaaatcctaagtacttttgttgtgttccacaaatattggaaccaaaaaccaaaggcatatcttcttcttcaccttccactctttcccacgaaaaataaaggctttgcttatttcctcgttaccgagaaataaatagcccaatctccgaggctctctcaaaagccagttgatactgaagggaccaattcaaaggccaagaagaatatagtagaccagagttataggtaaggctattaacattccaaatatgaccctgcatccatatttttcaccatcattcacacatttgttaatatattgtaagtttgtaacaaaaataaaaatgtggctgtaacataaaataagtttggaacttacccagtgcttagaatcgtgggatgcacattgtactcttttgcaaacacaaacggaactattccttgaggcaacgcagcctaataattcatgcattcatcaacatcatcatcgtgatcatgtaatatttataatagacctagctatatcatgtaacgttataaatttgtatacctgaacgatggctatacggagaaggtcgccgtgtaagccaatggcaatcccagcaacagccatgatggccggaccggttataaatctgaccgccatggcaaacgtggcgacagagttcccacaagcaatgattttgggttgaagtgccatgaataaaccttaaaattacaccaaaaataagcaattcattaactaaaaggatttgagaaaattgacagcaaagagttaggtcatctacttggtgagacccaaataagtagacagagccagtggggactcggcgtggggaccggacacaccaacatgtctgggtcagagggtcaggattctctctttgggtaagtgctttgtacagtttatatgacttttaccaattacaagctggacaactacgactaattaaacacacagacccactttgcattaaatgaatcttttttaacagataagatgagaacaaatttgaacccaactttaaagattagatcatcatcaaaacaagtctagatttgcatgaagcaaggttagtgtttacctaagctgaacatagccattccaagaccagcatctgagagtatggagatggattgttgtaatattttgggcatagccacatgccacctgcttccaaaaacaacccatactcattattagttcccactacaattattccatgcatagatgattatattatttccttttcttattataacatttatccataaaatctgtaagtaagaaaatgattggactcactgaccggtaagcaacaagagcccatatgagaccgattagactggagtacgtgtttgggtttctgatcagctttctccacaccattatcaatatcagtcgtgtcatcacacttgtcggcggcatatgtgttccgttgttgccgccgccatctccaccagccgcctctagctccgccgtggaattagaccccattttattcagccctgctgtagctttctctatctctctttctccctctccactatcaagaccgccgatatcatcaccaccacctgagaaaaccaaaaatcatgaatacatacaaaaataatagtattcgaataataataaaattaaaccaacaaacctctagcatattatttatgtaaacaattttccgcaattttagctaaataatatttgatgacaaaaaaaaaaaaaaaaaagaacctctagcattactctttcgaggttgatcagagacaaccatccgaatctccttagcaccttgttcagattgttccgttgccacgttgtcgcctgcacctccgccaaacacgtcggagaccggagaagcgcttgagctccaaacaaacatgtgaagctccttagcgtcatggctcgctttgctatctttctcttgcagttgctgttggttttctttaggaattttattcggtttagttgaaacacccgtaccggttgaaaactccgggttcggagccgggtacgaaccggccgccggaacagaactgttagtgttattgtaaaatccatatttaacggcgttgttctcttcgaagttcgaaggccgtggagtcggaccacgagaagattgaacggagtacaaatccgccggaccaaaattcgaaagcctcccgccgggaaaccccataacagagtaaaaatcagaatggttaaagttagaacctctcggagtcgaactaagactatagatctcagctccggtaagattcgaaggccgtggagtcatcatcagtgaccgtctcgatgcgtttgatttcctcacggtaacatgaagcttcccgtcgtttcctatctcagcatccgtctcaagaaaatcatgaccgtcgagagaaacgacgtcggattcaactttaaacgaaacaatagacgcaccagtctccgggaactgctccataataagaagcttagcgccacggtactcgaagaggaagagaaggagagtgtaccaaatgatacactgaagaacaacgacttggaccattagagaacctgcgtaggttccgtacatggcgatcaacagagggatccccatgacaagagtgtttgggagagtgctgagagagaagattgtgatcatccactccaagctaccgttcttggttaggttagcccatagagcaagtaagacgagcatgatgattttttgaagcgtgtcggcggcgacgaagcggaaattcatggcgtaaggatcgttggtggagatgaagtggaaggagaggagagggacggcgaagatagcgacgaagcggttgatgccggagcactggtctggtgagaatatcttccaccactgtacggatccgtaggcgagaatcatagctacgtaaagtggtaccacggcggtgaggacggtgtacaagtcgtgccacgtaatcattttttccggtgggttttggagtttagtgagaagacagtggcatttgagggggaattagaaggaagaagaggggtagaatgggaagaataataaagaaaccgttaagagagaaaagtacagtaatgatttacaaggattcggtgaagaggactaatttatagaggtttttgaggcagtgacagtgtcatcatcatcatcagcacacgattacgttttttaagtttgattaataatttgatttaaaatggctttgtgtgtagttgagtggggacacgtggcaaatcgcatgtggggggagttttctggagggacgtggacagttttatggaatagtcgtgcttttttgctactatcttattacgaaaaagtggtcttgtttttgcactttttgaaagttgcaaaaggaactttggcgaatactacgaattactgtatctgtgatcgtttttcttgtaaatgtaatttgagttttgattccaaatagaatcaaactattgtctacgtacttggtacaagaagacagccacataaaaattacaagaagaacaaatgtcattagtgttaggtccaagccactgttggaccgttgaattaattacacacatttattcccttttcaaaaattctcacttgctatgactagaataatattttgttttttgtttttgttttgttaaacttgtaaatatcattaaaaataaaatttgaggtattacaaaaaaaatattacttatagttacttatattacaaaaagtatttacaagctcacatctcgtcattttctcactcttaaaattttactctcccttatctctaaaacttcagccgccgcctgcgtttagggttaccggttccggtggctttctcagcaccggaaccgaagtcttttgttttgctcttattctatcttttttctttagacacatctgagagatttttttccaacggttgtgaatctgaattttcagatctagatatttaaagtctaaaactttttctttttaggtttttgctgtttgtcttttgtctttttcaagaacagagtcagatctggccgatccatccaaggcagaagcgtttctatccaaattttcgcctcagacttctgaaattccacctgaagatcccgatctcgttctctccttcatgaggctctcactcctttgggtctctggatgatggttttatctcatcgcccattcgtgtttaggttgagttaagtgaggcttctagtctcagatctatcagtttatcattgttgttttagactttgtatatttcgtttgaactcttggattttgggtctgggaagtacttgatcagatgtgatgtaatttgttagatcggtttttttcccctttgtttcatttaaatatgtttttagttcctggaaggtcccatgtactctccggcttttagaagagtgtttctcttgtcagctcttgtactcagatcttctatcaatgaaatctatatttccagtgaaaaaaaaaatagttatagatagatgttggtctgagactctccgactcattagaccatcctcatcgaataatttttcatagatgtatttcatataaaataatattaaaggtatagatgtcttaaatgttttaggaagatataattttcattttaatgaccctcatattttttatttgttttactcttttatatttaaaaatagccatctaaaaacactcataaaaataaccaatgtggatactcttaaatcagtttggacataaccaacaaaaaggaaagaataaagaagtaggtggtcgcaaaatcactaggatttgatagattcaagcagaaactaaaaggagcgagatttctgggaaatatcagagaagcagacgaggtcaagtcctataaatctgatggagagtaatgtatagaggcatcaattgtacactagaaaatccctaatattacttactcatctagctctaagaagtaagaacatctcagcgaaatctttgtaactttatttcggtatataaaagtccagtttgattcttaaaattgtgatcatgtttgattcgatggaggactagttatgcgatcttgcatccacaatagagtaatattgaccagaaagaaattacaaacaaagttacaatagtatgacatggaaaaataccaaatccaaaggatcatcaacgttggaatgtaaaaattttgatttgtgtaactcatagtcataggatgtgttcgaggagtgaataatctcccatgcttaatactagtatatatctggatgcgaaattcgcaatttttttatttttgtagcgaaatggtaaaaagagattcaaaacattcatccagcaatcactttaattaatccgaatgattgcaaatgaaaatagattctttattgaacacatatgtttacaaaacaagaatagtatttttttctcataagccttccggaaaaagtctacttcatcatagaaaaatgagaaaaatgatcaatgatcatctatgagatcaacgatcatagatgggatttgtaacacaacaacacaataacgggtttcatcaattttcaagtctacttcatcatccatcaagactttggtctttaaatatacaatggaagcaaattaaaatgatcgttcaaaaatcttacaaaccaggaaacatagaaaagtgagaatgtggagatcagttcaatgatattgtaactattgaaaaacggtttttgatcggcttcactatctccgaaggcaacgttcaacttgtcttcgagctccctgcaagccgtcttgacccgtgatcattgatctcaacattttcgataaaatcaaacttacatcgtagccgactgaagaagtatggcatccgaatgaattggtaataacaaattatagttttgtttctctccacaatatatatgtgttattgtaacaatgattattgcttggtaaccaaaatatatagtcgtaagaatatcattcacatctttatctaccagacctgtgatgtagataaacttgctcaaattcaaaggatcatggattaagcacttgagtactgtatatcatttcccgtccaagatcatattattattattccgcccgcataagacacttcaattatatgtccaacccaatcatgtctgatccatatatttattttctagacaaatagagtttgacctaacactacttgatagttgatacgaccaatcaataatcatgggatattgtttaggagatttgagtattttcggacgagggggtatatttgttataattaacgacatattttctaacacacacctaatcacatggcgaagactgaagaaacgagagcacgagtcacactcaccattaatcgttttttttgtttgttacattaactacaaataaactagcattcaaacacatattatagtatcaagattacgatgatataaatagaattatagacccttagatagaaacgtatcgagtttggcgtacctacaagatcaatgctcttttcatatatatatatgcttataataataaacatatgcatgttcgttcgttacatgtaatatctcgcaatggatcaaatcttatggtaagacacgatgatctggattctggtcccatgcaaaagaaaagatcacagctgtgattttctcaaaactcaaaagagctaaagcgtccttattattccctaagcagacgcttgatggtttaacaaaccaatgagctagaggggtatgtctgatgtcttgatcaagtctggtgtctcgaaataaacacaaactagttttaggcctcggccaaatttatttggtaccggaccgaaccgaatttaactaagaggtaccaaaccactgaactagtcgaaggcccaagttatgatgggccactaaatttaacggctacagtgtttcgcgttcttatgacttagatcacaacattaatgcaactataatttgtcttcaaagaacacaagttttcttttttccccaaaaatcaacatatgtcatttagaatttaattagttaaaaattagtttatatacaatgtagcactccctacattttttggtaaaatgtaaagtatttataccatttttgaaattgtgacagaaattacaagaaacacaagaaaaggaaaaagatcaaaatctataaaaaaaagatgataacaaaacagtaaaagaggagaacgaatgtttatagcgaaaacgaaagaagaaacaccaattcagagaaactcagaaattcgcgtgatttccacaactccaaaaagctggagtcccatcctagttaccgcgagcaaactctaacagagaccaatacaacgaacaaattttacgggtcaatatgggagtaataaactcaacaattgaatttagtagacttttgtgataatgatctgagatataatttttctaaacagtatcttatgttatttcaaacaagattaaatgataagggacttctggttaacaataataataataatatttacaaagcggaacagagtctcttagtatttacacgaaatcatgtgatcgttaatattttgtaggctcaatagcagaccttcgttgacttctaaaccatactcaaataattaagatacacaaatcaacgatcacgctcttgcggcggaaacgttttcttagccggaaccggcaccaccgccctcgaagggctcgcggcaggggtaactcgctcgcagcgaggacacatagtaaggctcgaggcagagttcaccgttgttgggccaaccttcatggctctaagctcttctacttctctatggagcctgtggttttcttccgttaatgaaccaaaccaccttttgagatactcgcattccatctcggtttgcttcaatttgctcctaatccaaacaaatccaaaaacgtacagtacgatacgttattttttgacatgtacgcgcgtaaacacattaaactcatagatgtttttgtacaacttgtaaattataacatgcaagcaatgatcaaatgctaggtgacgatgcaaatataaaaaatcatggaattaaaaacgcatgaactgcccaatgaattatgagtcaaagggcattgatgagaaagcaagtacacgaggcacaaaaaagaaaacacgttgattgatttacttaaaaatttattaaaaaataaaaaatcaaacatataaaaaattcaaaacgaaaaaaggctttaaaatacttctattataaaaaagggtgtggttatgattatagacttatagttataatttgggaaaccgtcataatagttatacgaccaatgttgaaattcttcttatttattgcaccatacctttcccatctgctcacaattattgtgggatctagataaaggaactatttttatattgagtctaaaaaagaaaagacaatctaaccaattttcagtttgaataacaatgactatcggattatatagattgattactaatatgtgtgtttacacatgaacaatatatattcatgcagaaactaaagacatataacctatatacgttaccgggaaattgtaataaaacgactgatgcgtaatgagttcatgaaacattgagacatatgcattgacacgtgaatatttaggtaaatgaaataatgtatacacgtattgacgtacacgggccaaagtgttttgtaaaacttgctccaagttacatcacacattaaacatgtaatggatatcacaattggcggctccaaaatgctgttgtcacttttgaaagtaaccatgcaacaacacatatgtacgtgatgttgatatatataactacttcaacattaacatattacttttattaatacgtgtggctgttaattaatctctttccgtaatttctttgacttcaaaaatttaggaattgacattttccttctctatgtgtaacaactaaacaagtggtgactcttcaagaatttaagaaggacctagaaggaaaacattataaaacaaatatttgatttaggacaagattagctttttattatttaagggtacgacttatatatacacgttaacggggtgggtcgaatccgattcagatttcattttttctgctttatttttatattccgtcaacgtttaacgcttatatttttgtgaactctctcgttaatcatcaaccacccaccaatgatgtaagaaaacaaaagtctcttaagaaagaaacaaagaggaaaataaaaccgtaccttgctctacggttttgaaaccaaacttcaatttgtcttggccgtagcatcaaatgcttggcaagtacttccttttgtttctatgtttcacaaaataaaaaacaaaatagattaacattcaatacaattctttttgttctaaaattaaaagatataaaaacagcagaagtagttatgttttattgtgaataataaattacgggattaagggtatgattctgtctgaaactatcttcaagaagacgtgactgttctctggttagacggagtttctttcgcggaggagcagagccatcatcgtgactgaattcttcatcgtctccgtcttcagacgacggtaaccgattcatgtctagccttagctggtctcttcctccgccacttccttcatctgaaacttattgcgtgtataaattatattcacaaggacaaaatgaaaaaatatgtgatcataaagaaaaaagacgatgaaaaaactaattatatttttatgattgtcaatatctgtttagagattttgtttgtaaaaacgaaataagataatcagatcatccaccaaaagaaacatagaatccaaacacaagcctcatcataaatatatacttggttggttcatatagtagtttctttaatcatattgaagcatgtatatatgtgtcttgtgtaaagcttaccggagagaggggatgaagagaagcctggaacggagatagtaagatccaagtttgaagagttttccggcaaaatcgccattattttgatcaatgaattattagggttcttaagagctaggatcgaagaagaaaaggtaaagtttgagaggaaaactctcagtttaatataaaagagacaaacttgaagcgtgacgatgcctttatatttatacatacacacgcatgcgtaatccatatgatatagagcatatagtttatatgtgtatgtgcatatgtacgtaaatagtagttttatcatagaaagacataaccaaagtaaattaaggagaaaatattaagatgcgtttggtatctcatcaacctatgaaattatttttaagaagtttttaaaaaaaaaaaatagtatggaaaattgggttttaaattaaaaagctaaaaaaagtttagtcatagtaataaatagaagagagcggggctgttgactgaagtctaccggtcaaaggatgaattatgagaagagtcgtcggaaaattgacacgtgtcaatcagtgaaatggaggagtaaaatgctgactccgtgtgggagactgacccagcaggttttttacattccattatctagatgattatgtttgttattaatgggagagtgagaaatatataactggtgaagattattgagatagaaacgcatattcaatcatcctaattacttacattaacttgggtttgttgaatttttgtacggtttaaagtagacgcatttaagacaacataagaatttgtttccagattcagtaatagcttatatattaactctcggtcaatattccaatggctaaccatggaaacatgtaacgttccatctatggttttaaaagtctattatcttaactactctctaactatattgactaaactagctagttaacaattctacgtgtatcgttcgtttcattaagagaattaaaaaaagataacatacttgaccggtctagaacttttgtggtgcattcttggtcattcatttgcatgagtcatatatttttatttgcatataataagcattcttgatcacacacgttcctttaactaactgcttaattatttagttgtgtccacgattagattagtatatcaaagtttcgtgattatgacaatcatatagtatttgctcattcatatttcatattctataaagagaaaattagtaaaaagttgacaaaagaaaaatagtaatcattttctcttttctgctttgagaaacaccatgagtccaatatattctcctgctagctcgtgaaacgcatgagaataatgtttcattgtacaatcatactgaccaaattaattacagcaaaaaaagcttattattcaaaaggtaaggatttatacttatgtttatacaaacattaggacttatacacaacaaaataaaggttaaattaggttaaataaagcatatacccctttattaagtagtttactatggtggcaaaataggaaataaaggggtatgtcatttttcgtgtggattgatgaaaatatttgtatgcacttttgtgaaattatgttgttcaaatagtaatcaacaaaaatgtagtttaaaggtcaaggtcaattatcaatatattataaatgcaggattatctagtgtacatttccaaaataaattggtactactgattatcattattattttcttacttttttatggaaagaatgattctacttgttggtgcatgatatgatttgcgtttattacgtttcaaaaagaatagaaaatgttttagacagttgttacatcagccagatttgtgtagtcaccaccaccatattctttgtgcggtcgattaaacacatcttacattaatcattgtctacttcttttactggaacaaccgaatacatatatatctgtaaaacacagtcttccaatcaatgttctcccaaaatttatggttaatggcttaaaaagcaatggtaaaattagacatgggtatttggataattcggattcggataattctgatgagggagtttattatccgtttggatgatatgactttcggttcggtttcggttcggatgatgtcggattcagatcggtttcggatcagtttttgaaaaaaaaaacctaaaaaattgtttaattttgtaaaacattgtataagtataacaaagataactaataataaatctgatatcaaggttatttcggatatttttgggtataaattatagctaaatataactaatattatatatatatataattttattttgggtttagcggatatccgtttggtttttggatcggatcggatcagtggaagaatttatttttcgttcgggttttgtgactattcggttcggttttggagccggaatttttggatcgattttgaatcagttttcgaatttcggattttatgtccatccctagttaagatattgataatttatataatttagtatgttattcaataaatatcgcggtaagtgtaacagtgctatagtgaccactctctttcaagtttcaacagttcaaagaattcatttgtatggattttatttaaagcgtcaattattagtgtcatggaaatggaaggagcaaataatttgaaagagcatagtagtataaaatattaggtcttatagaaaacgaaaaagagaatgatccccaatttgtacaaacagcttttgtagcttccgatgagcaaatcattcgtcttgggacgtacacagatttaacttccgacatcgctatcttctaaagtcaaaaaagtttctgtcttgtctcttaatcattttctttctactctttggatccaaacctcttgttacctatttcatcttcttttgctactcataagcaggtttcaattaagggattcttaaactatagtagttaacaaaacagggattaaaagccggcatagttatgtgtgatagataacttttggtcttgtagtgttcaaattaaacatgagaattgtcttttcatgattgtctttatcaacccacctcccatgctagtttctcatatatccaaaatgtaaaattttattagtcatcaaaatatttgccgaccaacaccaattattacacctataacaacaaaaagacaccaaaaacatgtgaatattttgtatatggttcaatctcaaacatgatccttgattatacaaatatatgtttgatcccttataaactcgatacaatctctagatttagctacaatggagtgttaagacacacacaacgaagacgcagaagaatgattaaggcacaagcagtgtcaatgagatgtggaacaagttgccaacactacaagtttcaatatggaagagaaagaacaaaggaggagacaaggaggttagtgggtccactgtttgatgattgggtaggaaacatttagtgggccaccacttgtctctttgtccctcccatcgtgaatcaatctcctcattggttgctacacaaaaaaagaaactcctgtgggtcggtcactcgccattccttattcctctattaccactttctatattacttcacactccacaaaactcttctataaacttagtaagaagcataaagctaccactaatttttctgcttttgtagatcccattagttcacgtcctattcaaaggcatcaatgccaagtcatacatgaatgggtctcttgttggacataaaacttaaagcgtagacgacaccaaacatgttggatctatgctattatggccacataggcttcacctgatgaatttgaacaccaaaagactatactactactacaacatgtcatagtaccaaattacttaacggacataccaagtatgtactatgtacattggcctgtgcaacctttcttagtcgcccagaagacaaagtggctgtctcatgctaagctcagctttcagcgctggaaacttctccaggtcatgagaatctcctagaacgttctgtgcaaacacaagatcaaaataaatccagagacgtagatatatatcaattcactgtaatgtcatgggagaatgaatgtataccaaagcggcgatgtgggcttcctgcaacatattgccgtctatttctagcctagcgaccgggaactctggcaagtgcccagactgtttcttcccaagcaaatcaccaggtccacgtagaagaaggtctatgtttgccaagtaaaacccatctgatgatttccccaacatgttcaaccgttttaggctattggtacttgacccaactaataagcacttggattttctggttcctcgcccaacacgtcctcggagttggtgtaactgagcgattccaaatctttcagcattcattacaaccatcattgatgcgtctggaacatcaacacctatctctatcacctgggtggacagaagtatctgtgtttctccacttctgaatttgtttagagcctcttctttgtcgtcactcttcatcctcccgtgtaacagtccgcaattgtactttggaaattttttggttactatttcgagctcagcagaggcagcacggagctgtggcagttgctctgattggtcaataacaggatacacaacgtatactctgcctccagacttcaggtcttccagcatcatctgtcaatggaaagaagatatgttcagatatcatttaatgttgaaagtttaaaaatcaatgatgcctttttctatgatgagagtcaagaaaagaaatgtagttattgtcattggccttactgagtagacttctttgatgccagtctcatttccttcaaaaatgtgcgtctcaactggtattcttccaagtggcataccagtaatctgaagaaacaaagagttgcagtcacaaaaactgcttatagacgtgtaacacatggaacaagtgagtttcaaccagatggataaaagtggagacgtttgacatacttgggtcaaagatatatctccgtataacgctaaggcaagtgatctcgggataggggtggctgacatggcaagaacatgaggagccatactgagatcagctttagaagtatcatcagagtcagatgagccactttttgatatcatagatgttccatataactgcagaagtcaggccacaataaacttcagtttactaattatatgcttacgtcgataaacaagaaagaaaactaaagagataagttcatttaaggtcaccaatcaaatgatcaccatggatcattactgtttattttttcgaaatagttcaactagagtgattaaagcaattatctgatagaatcaaaatatactaggaacctgaccttgctgttaaactttcctctctggattacaccaaaccgttgctgctcatcaactacggcaatacgtaatgcagagtactctatcttttcagctatcagactgtgagttccaattataaacgatatagctccactttgaagatcctgttatcaattatcagctataaggaatacaagcctcttgtatcatttaaaacgacatattagctgcatgacttgcctggcgaatcatacgtgactgctttgccggggttgaacctgtgagcaacccaatggttggcttggagcttaccccttccatattctccaacagatcacgacactgttcataatgctggatggcaagtaattctgtgggggccatgaaagctgcctacaggtgagaaaagagtaactcaaaaaacaaattcaactacatgaaaagaatgagttattagaggatttattgagaaattaacttcacatggtgcaatttataaaagtcgtagagagatttttattaaccaacctggtaaccagatcctatgacctccatacacgctaagaaagcaaccactgttttgccacatccaacatcaccctacatgataaaccgatctattaaggaactttttggttaataaacaaatttggcaacagttaaatctgattctgaaagtttcacccaataaaaaaaatctgattctgattgtctggtaagattggctaaaagccaacaaagaaagaactaaactataaccgagaaaaaaaagaaataccagccagctcagctgacaaacttacctgcaaaagccgattcattggaaccggacgctttagatcccatattatttctgagacagcgcttagctggctaggagtaagggaatatggtagagctttcagaaaactcttcgtgagagtggaccattcttcaatataaacggaattaagtactggctttctaaacttttccagcaatacatctttctctatttttgtgccaaggctttgaagcatttggtacaagcgtgccaactgtatgaaaaccaaagacaacggattaatcgcttcttcactaacaaattaatacttagagttctgtttatgagaagacaattattgaagaagctagttacctgtaggtaaaagaattcgtcaaatattagccttttgcgagctaaatcagcctcatctaaagtcttgggctcgtgaatgccaacgtaggcctacatttacagcaaggaaggaaactgagaatgaaaacaattgagaacataaaattttgttatggattaaagaagaagtgaagcaaagagcatgcttcaaagagaagcaagacttacatcattaagagatggtaggccaaacactttagtaatttccttaggaatcggatccatattggcggggagaacccgcagagccctaagagataaaaagtgggtgaggtgtgataaacaagcagaccaatcatcgaaatgttgtaatgcttagttctgagaagttcaggtacttttatgatatatgaagaaatatccttatactcaggccagtattgaaacactcaatcaaggtgaggcttttactcagaactgctgtttcatttacttttcaattttagatatggaaacgcataatgtcatattttactaaccagtgaagatcacggaaaagaaaagagaatcaaaacctggagatgacatcgctaaggaactttgggttcaaccctccttttgaaggatatataggatatggtctcccctgggctcgatgagatgattcttcttcatctttgagtacatctatattgtattccctcatttcaaaatgatcttctgcacgcaatgactttacctagaagtagaagagattattaacagattattgaattagcatagttgccaaaaactttcttcctcgtaaatctgtttctttagggatcttttatcgtgctaaaacaagtctaagcttgaaaagttgacttgaagaagagagctaaagacttatgaggcagtctgatatgcaagtaaaataccaaagcaagcaatacatacacatacaaagacaactttcagggaagcaaaggaattaccttcccactaatgcatacaaggtccccgactttatgtttctcttgaatagaattaagaaagggttgccaggtgaagcgagtccccctaaaaaacttcttcagatgcaaaaatattgattttcctgctttatcttcagcattatgactcagatcctccggagttctgtctctgcctgagacttcacagctgacaataacctcgagaaatgaaaatgaagagctagctctaactcccctgcatattgaatcgcacagagttcaaatttgaatttcagaaacgtgtagatgcggctcaacacaaaaggcataagcaatggttgctgaattgagagattctcaacagaaaaacagaggcaatagagacgatttcttgacaaagatttttctttgattatgtttgagatgaactttagaaagatatcagaaagagatactcactttgaagacaagactttcccaacaaatatcaaatactgtccatcctcaatatcaacctgtgcattctgcaaatctgcataggttcgaggaaaatgatgcaataatttcttcatctgcatggaaagacagtttgaaaattggtcttaagccctttcattgggaagaaactgttgtttctatgtattcaaatgcataccgtgtgaaaaccacagctgtctagctgattactgtgcctcttacttaacccaggcatagaatctatactagtagcaagaaatcgctgagcggcaaaaacatcatcagacgttgcttcaacttcagaagtagcagttttgctcgtaaaagaagaaccatcatctaatatatcttctcttggatcagaagaatcatcattctgtaaaagctcaggacagaaggaagataatgttctcgaaagattatccggatcaaaccatcctccatgcataggagtaggaaggaaactgttatcagttggcgttttaagaatgctacttgattcaccgtaagatttgctattggagtataattccacgggacgagaatcaccaagaatgatagaagggaatctcttacacgccaaaacaagatctttcttaacttgttcatcagatttcttatcaataaaatcatcaacattatcacactccatcaaagctgcaacctgatgcatagggaaaacatgaatctcaaaatctatatagaatgtttcagatgagacaatgaaacctggagttaccttagtaatcaacttggactgattctcgagccgagcagaggcatacttctcaacttgctcaagaagattgtcagaatatttatgctttgaacgataagatatgttccagactttggagaagaagaaattactcaacctacagaaccagcttgattgatcaacaaaagcaacctaatttcaacaaacaacaaacacaagaactcctacaagtacctgattctgttccagtttcctctctgagcttggattacaatgacactacgcaatcttctactaccacaacactaataacaacatttcaaaaccaaaaaattacatcagggaaacgttctacgactacgaagaagcaccatgatagataaaatacaaggggacgagtaccatgctacagggtgatagagtcactgccgccattggaagagatcaaaacatagcttgcttcaagtctacagacacgtcaatcgagcggtaattgattgatcaaacaaaggattcgaattgggttttaggttaataagaggaactccctgagaagggaacctcaaattccaagttcctgagcacgattcgagttaaagttggagtctttgacaactttgtgagagtgagagagagagggactacaagggtttaatttgtcttatttctacaagagttaaagttggagtcttggacaattaaaaattactcattttgagttttttcatgtatgtttatttgatcgattcatagtccaagtttgaatttgtttatgaactcaaaatcatttcttatgaagataatagcaaaagattatgcaaaagattttagttttgcttgctattgtttattgtagatatcaacatctaatttaagtaaatgatgatttaggtagattgtggtaataagaatatatatatgaatttcaagttccaagagaaaccattacacacgagattccaatatgagcagagagtaagaagaagaagaagagagttacaacaatgaaaacactcaggagagacatcatgatacaataggcagaacacaacaatcaatggtttgctgctaaacaacttgagaaatcaatttttttctgactatgacactgcagaggagacaccaacacatcttgaagcacagatactatcactcctcattagacatgcagaccgttttaccggagttgctgctttgtctacttgtgacgccttctgtgatgataagccagttgctgtgtttggagtctgtggaggtgtaaacaccactgaagctgaagacgattgagcatgaactgaatcagaaccttcgtcttctgatgagcacacccgttctctgcaaccaaacccaaacatgtacttatagcctgattcgcttaaaactcatgatggttcagtttcaagaagtagtaactcacctagggagtgaagtgtactttctctgatgtggtggggagttgtgttcctcttcatcgtcgttgtgttcttcgagtcgggcaaactcttgtttgaactgatcaactccgctggatatcaagattgattcaccaaagtaagacacactttctctttataaagaaccaagtttattggaaaaatgagtcaaaccttgggtatagaaaatgagagtttatgttctcttctccttgtagatactcttgcaacatctgtggatgatactccaaaatctgtttcatatccagaaagagaacaaaaaaaaaagttttaagagattcctaaaactcaaaccatacttttcagtctcataagaacatgatgtctttatttacctctctgtacatgagttccctcacgtcatcgcgagtcaatttcctcctctcaaactcaaactcaagtttcgagataggttgcctcgatggttcatagtccacatttgccaatccttgaaaatacggatcagccaatgcctgcagaaagaagaaagcatcattaaaatgaatgcaagtaacactggacaaaccaagatttcagtgtctcttttttcctcttagttacctcttctgcagagggacggtcctttgggtcaaaagcgatcaaacgctgaagtaacttcagcgccacaggatcgatattggggaatttatgggtgaaaggtacaggatcctttcgcctcatgtttcccaaatactttctagccttctcattccgaatctacacagattcattataaacaacttcatgacacacaaagctaataaaaacacacttgcgttcaaagcaagtctatctctcggagatagagagagagaagcctctgtattgggagagttagtttagcttccgggaaaaataaaaacaaaacaaaccctggatagagttatcggcgacggagttccaagcagatcagtcacgagttctagctggtgcacaacgtttttgccaggaaacaaaggttttccagttagcatctctgcaaatatgcacccaacactccacatgtcaatcgccggcgtgtactgcacacacacatcaattccataagctcacacatcatcacaatatgcataagtatatggaaacaggacaaagaacaaggctttacgttagaatagaaggaaccacagagctctggcgcacggtaccatcttgtagcaacgtagtccttgcaaaagcacatgacaagattggttacttaatgaaagcattgaatcatttgaactaacatactatgcattattaaagaacatatgaattgagaaagatagaggaagatacatacagtccaaaacacagcagaaggggaatcagtaaaggagacacgagcaagtcctaaatcacagatcttgattttgcaatcagcattagcgaggatgttcttaggcttcagatctctatggaacacatgagctataatacaagaacaaaatatgataagaagcaagattcaaagaaaaacacacaatatatcttcagatgaaaatgtaagagctagagaaaacaacaagggaacaaagaaaccttacctgagtgcatgaattttaagccacgaagaagttggtacaagaagaattgatgatgctgaggagtgaggtcgtcatttaccttaagaacgtggtgaagatcagactccatcaactcaaaaacaacatatatatctttgaattccttgcgacaaggaggaagcatgatatgcttgatctccacgatatcaggatgtcgaagaagcctgagaagcttgatctctctgaggatacgaatagcatctgagacatgttcaaacacatttgtcatcttcttgatggctactttgcctcccgtgtgtggacattccgcagaagcaacaactccgtagcttcctttgccaacaacttcttggatctgatattgacttgcttcaccatactccgtgaaaaactctttctccaacatcttattgatttctcactgttcacaacaacatcaacaacattccatcaatacaaatcttcttcttggtcaacaaagaacccagaaatgctataataaaaccctagatccaaaagacaaacccagatcctgattagtttcctagatcaagcaatattcacaaggaagaaccctaattttaggacaacaacaaaaaaagaagaaggataaaagacggacctttaagataataatggaagagaaagagaaaataatttccacgaagctgcaacgaagaagaagattgtctgaaattaaaagcaaagagggcacacgctcttttatatatgaatccgcttcaagacaaaacagctaatttcacacctttcgccgatcactctattattaaacaccttttaattatggaggaaaatacctctttttagtcatgtgttttcggttatttattcggtttccgttcgtatccattcggttattaattttttcgattttaaaatttagtatttcggtttgattttaattcgattctgtttttttttttttaaatttagtattcattcggttaatttgttttgaatatttgtgaatatttttggttaatttctaataaatttactattttatataatttttcaagaatttttaattatttagtttgaaaatataattatattttggatatttttggttaccaaaatactttggttcggcaccgattcagcttcgattcttttggttaaagaatttagtatctattcaattattttctaatttttaatttgatttagtttagttttatgtttcggttaaatatatcggttcggtttatttttccattcctatttttagaaaacaagttgccttaaataaatgaaaaaaatagataaggactttttgctgaaatcagaaaattgaaaatcaggaatgagctgaaatcaaatcactgtaaatgaaaattaggagaaaaaaaaagataagaaacgcaaccgaagattaaacaatacctaaaaatgcgagccataccttatcttatcttgttgagaattatggaagacacggctcatttgcccttctgtctttttcatctacccactaatacgacagcgtttagcaggcgaatataagaaatctcgaggaaagtctctttgttgtgcagaggttcccaccattgttgaccatcctttggaacgacgccgtttttgtgacggtgctcaagttgggtcgctttttgtgttgcttgctttttgtctcttcattactctaatgggccgtaacaactgcgtagacttgggtactttttttatatcttattattggtcaactgattttagtaaatgaagagaaaacaacccaagaaggagtgcatataaatccatgtttatagtaaggtataacaaacattcttctacgagttaagaagctcaaaaaatggatgaaaagtatacttaaacctatatctaagttctatatagattggtttcctcggtcgccgatcacgaactgaagagccattatatctgaaacgcattgttttatattttctcgatttctaactaagtgtaatttaaatatttctttttttctattataagtgttgttctcacttttctatgcaaacaaaaatatatttaatagtttttagctaattatattttactttcttattggttagattagttataactaatgatgtttttataggaaatagataaattaaataaaatttatatattttcttaatttacttgtaaaaaccttaaattacaaatattaagaaacaaaggaagtatgattcaacactaaagtcaacgttttattttgagtatttcttctataccaaaggtcaaatatcttcaatacttataactttcatcattcaattgaaataaatgaataaactaattgcgctttgctacgccacaaattctaattgcaaaatcaacttacattgattaaagagttgacctcacttgaaagtgataatgtatcaaatgaaaaagcttcctatcttgacggaagataatgtacgaaacacgataaggacataaaacacattcatatttttttcttatttaagaactacactaaatgaaataatacttgtggaggcaaattattctgaataactcttccataggagctccaaaggtattcgatctctggacctatcgatgtggtgtcttctgaaaacacttctacgtacgtttgcgttagtagtggattaaaacttacgtggatctcgcgggcttgatttatttacgtggatgatatgtggttagtacttagtaggacttaatgacgtgaattgaccttgttatatatggtggccgggtacaacttacaaggctaatacatattatggctctcagtcacacatttgacgtttctttagctttccgaatcgttagatcctccaacactcaccatatatagacgatcacgactatctccccgattaatgtcagtgcgggaaaccatactacgaaggtctcgtcttgcatgaatgatcacgtcacgtgtcatacgattgattttttttttttttttgaatatcaggagattctgggtcgaagcccgtaattcccctggttcgaaaccacgacatgtaatattagtttcgtcacaaacgtcaatcgaatcggcgatttttaagtttcgcctacgatctttaccaattgatatgtctttatacaaaatttagtttcgacaataatgactagaaatttttctcttaagatttcttaatcgttaggtgatgatcgcgattacaaataaaatgctaattaatggtcgagtcctaccatttctttccccacctatctaagtttcatcccaattccaaattcaactcgtagacatatgccttactctatgatttctctatcatttttcgaaaatatgttttcaagttgacatcattgtagagttagctaatgggccttcgacattaactcctgaaagccttatatgggccaatctattgaactttttctccttccattttgggctgatttattaagttcacaacacaccgattaggacgtgcttagtttttacttttctccttccattttattatccatcacataaaggcatgtttaagagatgaattttacataaatccttttttctctgcaaattcaagctcttctttaaaaaaaaaaaatcatttcatttcctctagtaagaattaaatttatatttagcgtgttcttttagtgaacgcagccacaacaatagcaaagaagaaaaacagttctacggtgagaagaaaatatagtgataagagagaactatcacaaaagatgaactacgatgaagattgaagtgtcgctggttaatttcagcgattcatcgaatgcagttgcaactcaatcggcgactcatccaaagttgttattttaagttctaatgtcgttttacttacctgctacttctcatgacaattcgtcttactccgttgttgccgttgtcgcaacgttcagtaaaagcacacgctaattaatttttaaaaaaatgaaaaaatagctatattcacacctataatccaatccccttaatagaaacgtaactacttttcctttttttctttttttctttgtcaaccattgaaaatcagcctaactttaaatataattaatattacaatggaaattaaccaattaattatagaaatataattaatattacattgattaatatatttttttaaaaaataaaccaattaaaatggtataatagttacaaaatcttaaaaatagagttaatttcagctaaaaatttaatttctttttggtttgaggcattttgagtttgagtgctgagagagttgaagcggacggggaagaacaagcgggagacttgatgcttgcaagcaaagtgttcctcctaatttttacatataactaaactcttaattaattagaaaagcaaaagaaaaaagttgagaactctctgtttttttttcctttctttttaatttcactttgattcctaattttttttgtttgttcgatcttcaaacccaacactctttcttctctcgatccttcccattttccgatcctcggattcatcggaatcgtcctttgatttgctccgaagatcatcccgactagctgaagccacatggacgacgaggttgttcagcgagttttccaagaaggaggacgagatttcttccagcaacaaccttctacttcttcttcctcttcttcgattcttcaatctcttcctcttcacgtggtacgcttcttctccctttcctaatttccagaaaaatttacaagttgaagaacatcaatcatcgcttttgctgtaggctttcgatcatggctattatctgttggtgaagtccattcaagagcttagagagaagaaggacggcattgttactgttggtattggtggacctagcggctctggtaaatctaggtaatccattgtttatgtttagtgtcgaatttctcaagaggcatgctcgatttcatggttttttgtttggttgcacgaagcttggcagagaaagttgcatctgtaattggctgtactgttattgccatggaagattaccgagatagtttggacgatggtaatgagttggaaacattagattttgatgctttagtccagaatttggaggtacttcattactcagagatttgtgtttgtgaaacgtctgttgagtaatgacttaggtttgactaactcgactctttctataaataggatttgatcaatggaaaagatactcttgctccggtttttgatttccagcaaaagaagcgtgttgattccaagatggtgaagacatcctctggtgtggtaagtcataaatgtgattttggttttggttttggtatggctcctatggttttacgttttggtttgttgtaggttattgttgatgggacgtatgctctccatgcaagattgcgttccttactggatattcgggttgcagtggtaagattttctcctcctagagcagttattggtctagctaatgtacaaccatgatatcatttattctctctgtggttaggttgggggcgttcattttagccttctctctaaagtccgttatgatattggagattcgtgttcgcttgattaccttatcgacagcattttccctttgtttagaaagcatattgagccagatcttcatcatgcacaggttgaattgtcttctttttcctccatttaagtgttcagaagtttgacttctccgtttgttgggcgtgtgcagatcagaatcaacaatagttttgtttcatcatttcgggaagccatatacaaattgaaatgcaaaactgaggtctgtagtttcttccagttgttgtggtttcatgttgggacgtatgtttaccacttgactaagattcatgtaacagatagtaacttcctttcctcaagaaagcgacgtgcagaaggataagtaagaaggattcttctattatgtgtgaatagtttaagatttttagttggttttcataggtatactgacttggtgagttggttttcagttttattgagatgtacctcagaccaccttctgcaagcgaagaggcacggataaatgactggattaaagttcgtcaagctggtataaggtactatctgtcacttggagaccaaaggattgttgacaagcatttcattatccggcctaaagctgagtttgaggtgagttattacatgtaattgccgaagtttcagtatttctatggtgtttccttcttcctagttctgcaattttttatggaatgtgaagtatcgctacctctttattgttagcgcaaaagataatggtagtaatggggttatgtaggattatactgttttggagactggtccaatactttccttggttgtgttaatttctcatattatctacagaagaggcatgcctatatttgtggaatctggattctggtcaagatgacgggccgcttgcacacatcctattaaaagataccccttacaatccttctgtatgtgacttaatttctaatgtctagcaggttggacggatgacacttggagggttgctagctttaggctataatgttgttgtgagttacaagagagcttcaactgctgtcagttatggtaatttatccctatcacgtgaaacgattgatactcttggagagactttcctggttctgagagggacagataggaaggtaataacccattattctctttaagaacaagcgcatcgatcttcaatgcagaaaagactttagtaaacatatcttttagctggttttctctctctctctctctctctctctctctctctctctctctctctctctctctctctctctctctctctctctctctctctcagtagtgaggagtttagctttgtcagtatcccttttgatatacatgttttaatagatctttttgcatagagtgtgggagctgaagctctgagaatgggcatcactgggccctggatcacgaaatcatacctcgaactgatccttgaaagcaaaggtcagggaatttgatatagcatgtttgtttccactatctatcctttcttgtgctctgcagtgcaacagaatcttaatttctgtaagcttacccattttgcaggtgtaccacgcttgaatacacctccacttttgcaaccgtctcctgtaatcactaaccaagagaagcaaattgttgcaccaaaacctatccgaactaccccaaacatcgttacccgccttgaggatttatcgcagccttggactagatctcctacgaaatcccaaatggaaccgatggttgcaacttggcatttcacctcttatgatccacctcattcagtaagctctgtagtaggtatgtccgaattttttgaagattgatggtgttttccctttgatattttccctcgcttagtgttatggtcgatgaaatgtatttcagtagcattattattgcatttatgcctaggctttctcatcaagcagctacagattcctctttcagggataatatgcggcttgttcctatgcctgattcatacgacttggatagagggttgctactttctgttcaagcaatacaggtaatggggttgcaagaagatagaagaaataatcgtctgttaagtaaaaaagttgctacttaacgcggagaatttgttctttctagtaagggttcttttgcttgtaattttcaggcattgctggagaataagggaccccctgttattgttggaataggtaatattgcttgtttgctgtttgtgctgttttgttttaacacggagcctaaagcttatgtttagtatatattgtcacactgtttcactgtaggtggtcctagtgggtctggtaagactagcttggctcataaaatggcaaatatagttggctgtgaagtggtttcccttgaaagttacttcaagtctgaacaagtcaaagatttcaagcatgacgactttagttcccttgatttgcctttgctctcaaaggtaatgctttggtttgcgaacgtaaacggataaggtaacttgtcagcctttgggttacttttattggaattagaatctctctctacttcatttgcagaacatttccgacattacaaacagtcgaagaaccaaactacctatatttgatttggagactggcaccagatgtggcttcaaggaactagaagttcctgaagagtgtggtgtggttagtgatcatagtcttcacatatcatatggtgattgtctttgttgttttctcagcgtggatgatttttataccacatcgttttttagatcatcttcgagggggtttatgcattgcatccagaaatcagacaatctttggacctttgggttgctgttgtaagatacttttctactttattgttccttcttttccttccattcacaaatatttttcttatcaaaaacatattgatttttgtttctttcactaaccaggtgggaggtgttcattcacatcttatctctagagtccagagggataaaagccgaatcgggtgtttcatgtctcagaacgagataatgatgaccgtatttccaatgttccagcaacacatcgagccacatctagtgcatgcacatgtgagtacacctgagattttagatttcacctactagtgaattgttctgtacaatctttccttgaatctgttactgttgcttactcgtttttgtgattaccattagctagtgaaaaacaaaaagcaatctgaattctataaacttttgagtatatatgatctgtatcgatacttaacaagtttttttcccaatgatacaggttaagattcgaaatgattttgatccagttctctctcccgagagctctttgtttgtattgaagagcaataaacaagtaagggttaaaatataatcacattctgaacttccttaatttacagcagcactcacgactcgtcatgtggttgataaggttccatatcaggatattctcagcatccttgattcgacaaaattctgcagttccgttcagaattttatcgatatatatttcaggctatctgggcttcctgcgaatggtcagttgtcagatagtgactgcatacgcgtaagaatctgcgagggcaggtttgcagtgcttatacgtgaggtctggcttctatttgtaaactcatgaatgcattgtaaattattgaactcatcacttctttttctaatgtctcattaatcttctaacgtaacacagccaattagggaagggaacttcatcattcagcccaaagtagattttgacattagcgtaagtactgtggcgggtcttcttaatctcgggtgagcaagaaatcatttaagtttgtttttcttcagtcatcctcgatatttttctacgttctctatatccgaaactcaatatagtttctattcttggtttcaggtatcaagcagtggcatatatcgaagcctctgctttcatttaccaagacggaaaggtgagtatacacattgctattagtttaaaatgaaaaacaagcttcttgagattagaaagccgattttttttttttttggttgagcttttaaagattcttattgaggttgatcatctccaagatgtgccaagtccatacatacagatcaaaggcgctaacaaagaagcagtgacggctgctggttcagctctcaaactagatggttcatacacaacaaaggttccacttctttttcgagacaactttagttcgaacatcgtttacctattatatacataagtcaatattttttccgttttgtgttttcttgaatgaagagttaccttcaaatagtgttggaaagactgccaccggtccagagaagttcaagtggaatacatacacagcaagcagcgcggttgcaagagcttgtggaattcatacaatcgcaggtaatcaaaagtctcctcaatcctctttatctcattctaggtttattgtctctaaaatggttcttctatgcctttttgacgactttaagggaagtagtaacagtgtgtcggaatcatcaccaagaagagatggttcttccatagacaacgttttagaagatatgcaatcaagaattaaacgactcgaacgttggcacaccatcaatacggtatcatatcaacatcattgtgctttaaaaaaactaatcacattatgtttatatcaatgattaaaagtaaccaatatggtgaaatcaggtactatggacatttttgatgtctgcgctcgttggttactctctctaccaaaggaagcgtcaataattaaaatcttttctctggtaatcttcatttcttagttttaccaaataatctaatcgcagaaaagaaaaaaggttactaacctgtgggaatattcaatatatagtctccagacattgtaactatcattgttttaatatgaaaaaagctgcaatgaaagttgaaaccatatgtttattttctgttctttaagattgatgaagtgttgaaagagtcttactgatccatcatatgataatagttttctagtttactatgtctacaaaaaaaaaaagaggaaacaaattgtaacttttgctgttttagtgttagtttacatgttttattgatataaagcaagcaagtttctggtagatgtcaaacataaaaagctaactcaaagcgtaatcgtatgatatgttggttacaagccattccgctgtatcgtcctgtgtggtcacttaaaggcctttctaaggtatgataccctttgccttcatataatagtatgcaaccacgtatagcaacactatcaataaaaccagtagccaccaccttactccagctgcaattgcatcatcgaaaaaccacattttagtttagttttctattggaaacccttttgttaaaatggagaagcaagaggggaaaccataaatatatacgtacgtttgtcccccttttgttcaatcatggtcagccttgcccttgagtcaaaagataccgacactaatcccctgcaaaaccaaacccaaattcaatctatctgcttgtttggaaccattcaatgatttcattttctttgcttcagaatttgtatatgtctatttgcttgtttggaaccattgaatcaatagttctagagtaaatacttgagccccaatgagtagagaaaaaccttgaatcaggagagaaagtcagtgctgtgaccaaaccaagatgcgctttcttgacgacttggatagtttgcattcttgtcgattcaagtattaaaacatctccttcaagggttcctctgcattaagaatatattatgactaccaaaaacagtatcatccttatctgttggtcccaaaagtgagaagacagatacacttacattgcaagaagcttcccatcagctgagacattaaaagctgatatagagttcttttttataggcttcgaccattttcttttccataattttgtatcacatgttataatactcccaccacgttctacgcaaaaaaatcaatcctcaatcgttagcagtgacaagaaggaaggatttatagttcaatattcttgtaatgtcagaatataagtttaccagtgtttgcagcaatgtaaagaacttcattgcctgcactgtctacagagaatctacaggaggcaaacatctcgtccttcattcaatattcaaactcatcagatccaatacaataatgttggaagtgtgtatgtaaagttgaaaagacactaagagccaattccaactgaccttctcttttgatagactggcaacagcagcagaagcattcacgtcccaaactcgacaaactggaccgccaagagatacaagaaattgaccactttcgctgcagacgaaaattatcattatcaggatatctgtttacaatcactgttcaaagatgattcctttgtcatccaagagaatgaaccacttttcggatagcaagtatttcccttatttgataagagaaagcaaacctgaaagtaaggcatttaactgaagaatgagcctgggactcattaagtaaagtattcatgctaggccatttaaaaaccctcaaagtcccatcctatactgcatcaaaacaaaatgcataagaaccactaaacgttttatgtctctgttattaaaaagagattgcatcaaagatcctttttttacctccgcaccagcagcaagaacagacccctccggattaaacgccagagccaactgttgtccaacatctcttaactctttaatcacttcctccgactcaccagcctgattatcctctcggctcataatgtcttcccaatgaaacagtctgtgtatcaagagaacatcacttattaccacatctcttgtaaatttctctctactccaaaccataaactcacagaacttctctctaaaatctcatgcactacgactttgtatacagaaacttcaagatcatatgctttcatttgaaatcgaattgagaattactcacttgcaactgttaggcaacgcgcaaataagaccaccttcccgaggatgaacagccatccgataaggcagatcagagccaaccacaagcctacccagctgaaaataagtatccgatctagttataggaaatacaaaaccttgcaaatgcataagatctgctcctatacactcatataagaacagaatataaaacctttcctacttacaggttgttccgagagagaattggtgtttagatcaacacggcatattaatatgacattagagattccacttcgtccctctccgcctccgccggacaaaacgatgcagctccgggaagaagaagaagaagaagacgactcatcatcatcttcagatttctccggatccattatgattttggatctgacatctacctccggaatccagtcggcggcgtaaatcggtacaccgtaagtctgcatattcgacggttgattcgtctctgtactctgattcgccatcctccgtgtctgtctctcgagctcaatgccaagtccccactgattcgtaaaaatactaaatacaaaaaaaaatattaatgggctaacttaaggcccattacagtatttataggcccatcataatatttcatttatcgctgaattccggtaaagtgatagcggttggacccggttcacgggatagagacgggaaagagtacggcggtacggaggtcaaactcggcgagaaagagtacgtataccggatcctttaatttttataatattttcatttatcaccccaatactattgatttgatctaaaaacaccctatagttgtgtaaaattcttaaatcgatgtgttggtgatttttgacgtaggtatcatctgtttcgggacgaggacatccttggtacattgcacgagtaaaatgcaaaggaagtctctgagtcagctagtgggtttcttggtggaataataatttttcagtgactcgtttcgatacatgttgttgaaatttgaaagttttgttatttctcatcattttgttcctccttaaatttggcccttttataactgtctttatcttatgtctaatcgttttctgtgatttatatctttgtatttagtgtgctacttatataagttaaaactctacacgaataaaactcaagtagtgagatttcgaagatcaaatagtttgtaaactacgacgaaaattacaaaaattgcaacttgcaagtgtcactaactataaatcacgacattcttccctttcgaaaaatcttcatttctcgacaaaaaatttaggtttccaatgatgaccacaaaaagtggaaaaaaacgattctcgtttctgaaacgtttcgcttccgcgttttcattactgtttctatgctagagagtattagtgccttgttgtcatggtcatatatctcaattgaaaatctcctaaaactatatataaaatgacatatagtattttactaaatttaggaatcttttcatttatatagtaaaaaaataaaatagtgtcgctgttgccaaccactctctatccatctcagtttgcacatgcaacacaaccacatgctaattgctagtgaaactctcatactgtttaattaactccctaaatatttatcaaacaaatgatatctacgttttttaaaaaaaaaacatatctttagattatagagttatacaataatttccacatacataagcttccacgtatccaaatttaaataaatattttttgtgtataaaatgtaatccaaagatggagatctaaatctactaattaactcacaagtcaacatttaaatatgcttagaaaaataattgttttcgatctatgaaattatgtggctgcattatagtattaacaagcaatcatgcttagaaaattataatattgttatcaatacaattacaccctaattccttaccaaaaatacgtgccgtttcaagattagctaaatagagcatggaatcaacattgcttgtcgtgttggctttctcttcggagttgttaatttttaatttaatatttttactattttcatcacattattgaatacgaataataattgtattaaacaatcattattggaataagacttagatgataaagatattctaatcatttataaaatacgtagatgttgactttttttttttggcaactatttgaaatatatttgtttccaacgattattattttataaaaaataatcataaaatttgtgacctgcaatatgacattaatagttaaaaaaaatttcgtcaaaaggaataattcacaattttaaatagataaaaattgtaaccagaagatataccatcatatatatttacaaattgtattattatctattcataatacaaaacatgacaaaagaaattggttgagttcttgtcgggtattttccatatctcacacaaataaatcaaaaattgaaaaagattacaagacacaaacaatccaaaaaattaagtatcaaaaggcaaattttttatttttatctttagtttctcgtagtgcaaatattaaagcggttaatttgatacgtaaaattcgtgttcaaccgcaacatattatttacgtaaacaacatttttcaaaaattgcattaattaattttggataataaaaaaaaaggtatatactactaaaatatggagattaactaaaactgttcatcaagaatcttcaatatatatctttaaagagatttatttcgaattttattaaagaaaaaaatttgaaatctaaagggcaaccaaaaaaaaaaaaaaaagacaagaggagaaagaaaagcaaaggaagggcatgtgactgatcacggctttgcctccaccgcataaagctcccttcacagatacatacactctctttctctctcttccggcgtttattcttcttatttcgccaccgtcctccgccgccgtggtggacttatatctctgcgtttcacgacctgccgccaccgccggcgataggtttcaatgatgaattaaggcgttggccagagagagaagagagattgagatctgtcgatatgctagcgaagaatcggctgccgggaagcggccacactactccgtctcctccggcatctcctcgccgttctcctcgttatcgtcacggtcggtctaaagccgccgccggtagtagatttcctacggttcaaccaagtcggaccctcgctcatcgcctctcgtggatcctcttatcggttcttctccgtcgtcaggggattttcttattcgctcctctaatctatatctcttgtatgctgctttacatgggaaccgtctccttcgacgttgttccaatcattcagcgtcgacctcctccaggatccgtttacaaaagccctcaggtttacgccaagctccgtcctgagatggacgccgataattccaccgctgatgccgtgagttctctttttccagctccaacattgtcttacatagagattttgattcttagtgaatccttagcaatttcttctgaatgattagatcatgatatgaggttgttggaagaagaatcattagctgattcgttgctcttgtgctaaattagtgtttcggatttagtgattgaactttctctagaggaattctggtgatggttctccttattctggggacatttaggttgatgagaagatactgtgatattagttttagctctatttacttgtaaaaacttatctaagtacaaagacacattgagagaaagagcattgaccaggagtttttcctaggttcgtattggttatgttccttaccattacaaccactgttagattgggagattttggtgagtgaatacttccatgtatcacgatctctactgttattctgtggctgctttggcagcatcttatactgtttgattgataagatgagaatcttagtatagagtggattgccacataaccactgtacgtgcgatcaattttcatgtatcatcaatggaattgtatttaccgcagataacaaccatctggaaacattcctataaaggtggtgaatggaagccgtacgtgaacaagtctactggaggtattacattgtttttgtaataattctaagcttcagcgtgtatgaagcatatcttgtcaaaaagtggagtatggaatttaatatgcaatagtaaagtgttctgtacgttctgcaaagttttgcctggagctcagatttagtctgttgtttggagcataattgattaattgggtatctgcttttttttgtttataattgtagacttgcctgagtcaaacggttacatatatgttgaggcaaatggaggcttgaatcagcagcggacatcggtgggtttgttgatcttttcatgatacttgaaatttatgcacatcgctcaatcattttagcaatcttgtttatgtcaaagctgttgacttatctctaccatgttatgcttagatatgcaatgcggttgctgtggcaggatatcttaatgcaactctagtaattcccaactttcactatcacagcatatggagagatccaaggttttagattgctttcttctgaaaatcttgtttgtgcaaatcaaagccatcttttgtagattgctttctgacagaggtttttctttcagtaaatttggggacatctacgatgaagagttctttgtcagtaccttatcaaatgatgtgcgggtggttgatacaattcctgaatatctaatggagcgttttgaccataacatgacaaatgtctataacttcagagttaaagcatggtcacctattcaatattatcgagactcgatcttgccgaaacttcttgaggagaagtaagttacaaattgttctttagaagtttgttttcatgtggtagagttagttacacattgttggtagggttaaaaatatagtaacaggataaaccaccttttttctagcggaagatatgttttggatctgtttagcacttgtcattgaagaactgttctctttgcatggcacaggattatacgaatatctccatttgcaaatagactttcttttgatgctcctcaagctgtccagagacttagatgtttggcgaattacgaagccctgaagttttcgaaaaccatactaaccctaggagaaacactggtgaagagaatgaaagagcaaagtgcaaaccacggtgcaaaatacgtgtctgtacatctgcgttttgaagaggtttgttccatgtaaaggagagacatctatagaatccccactggtctttatcatggttgtaaatttttgaatggagagttttgtgtctgagttgaaagattaaataagctatatctacatgttgcaggacatggtagctttctcctgttgcatatttgatggtgggaaccaagaaaaacaagatatgattgcagcaagagaacgaggatggaaaggaaagttcacaaaaccaggccgtgttatacgacctggtgctatcaggcaaaacggaaaatgccctttaactcctttagaggtatactatcaccacaatatattagcattctcggatattttcttaagctaatcatccatcagaatagttccacaaacccttgtgagcaatagtgtgacttgttctgtttggattatacttttcttgtaaattattcaggtgggtttaatgcttagaggaatggggttcaacaaaagcacatatattttcctcgcgtctggtgaaatatatgatgcgaatcgaactatggccccgctactagagatgttcccaaatttacaaactaaggagatgcttgcatcagaggaggaacttgctccatataaggtttgcttctttcctggtgtttgttccagagtatatttctcgtgatgaatgataaatctgacttgaaactctgtgttcagaatttctcttccagaatggctgcaatagattacacggtctgtctccacagtgaggtatttgtgaccacgcaaggtggaaactttcctcatttcctcatgggtcatcggagatatatgtttggaggacattccaagaccattagaccagacaagcgaaagttagcaatcctctttgacaatccaaacatcgggtactcacttcttctactcttcgtcttcgataaaccctaccaaatctccacatgaataaaatttgaattgttacctttttattcaccataccagtgttgcactcacctgcaaaccttacaccctgttactgtgttatcacttattgctcaaacgatgttttgccccgcagatggcggagttttaaacgtcagatgctaaacatgaggtctcatagtgactcaaaggggtttgagctaaaacgacctaatgactccatttacacattcccttgccctgactgcatgtcccgtaggaacaaaacaacaaccccagaatcgagaccacctcctgccacctgaaaacacacatttgattaccggccttccagaatctgcttctacaggctacgttcattccttgtaattctaattctttcaaatcagacacaggaccttagtgactcggcctgcccagaattttagggaagacagcgtttgaatgggccgtggaatcatctatttattctccggcgaggagtaacagccacaacattgtttgatacctttgacacattgaagctgatgtatctaacaggaaagacgagattgaagttttaacacattccctagctgctgctgggcaaagaataggacagcgtttggattttggtgtttttttcttggggtgttttggtggtttgaagaagcgtttgcgttttgtacattttgtgaacgcaggctttgtgttaggagatatgtagagagagacggacaagggggagaaaagaagctgccctaaaagttttgtacattgatttggttagagatcattgtctcttcttttcttttcttttctctgatcatagggttttttaattgtttcatcatcatattcttatgattcttttctttcacaagataattttttcaatagtgatttaattcatttttgcttcttccagtcgtgttcatgtttttcatttgttcttatatcagttttaaatttattcacttcatgtacaatggggtttgcttcatctctaatccaacaaatacaaacaaacaaaaaaagaatcaccttcctagtttatttctatgcgctacttaagcgcgtgagaaagtacgatccacgtggaactagcttctttcgccaacacaacacagagtttggctcacgaaaaagtgtgcgcgtggggaagaaaagggtctcatatataattggagtgtaaaatgtttgacctttttgtttgggtttatctcttttagactcaacaacagataaatttgttggtttcaagtattatcaatttcccggcgaaatctccaccagagttatgggaatcaccggaagtctaacgccagatcagctcgattttttccactctcaaggtttgtttctctgaaatttcattcctcgtaactctctatgaatgaagaatgattttgtaattcaattcaatggaatggatataaaaaaaaaaaagggtatttggtaatcgaatcgttcgcgagtgaggatgagataagaggcttaaggaagaggatggatgagttgcttaatcagtttgattgttccgtctcctctatcttctccaccaaaaatcaggtttttatttctttaccaaaggttttgattcaaaatcatcatcatattgttataagaatggttgttttgattattgtagaagcacaccacagataattacttctttgagagcgctgagaaaatctccttcttctttgaaggtaacaatattcctacttttcttcaattgcttagattcttgattctgtttagatataatccaaacaattgtttggtagtgaatccaaatgagtatgtttttaccggttttatgttcatgtttgtgtgcaagtgctttgtttataactatttcttttgtttactacaatggaatatgaatatgaatcttagtgcaatgttttggcacttttttttatgtgtgggaagcttcggtcatcctttgattaggatgcaattgtctagactaattctatatccttgattcatgttctagtgtgcttttgttctactccagctataagctaaaggttccatgtgtttgaatctcagaaaaagcttttggtgatgatgggaaattgaagcaacccaaacaactctctataaacaaagttgggcatggtatctttttctttcttttggctcgcttattacatacttttcgttggatcacgaatgttaaaattgtttgttggtgcagcactgcatgagcttgacccattgtataaggatttcacatattcgtcaaagttttcaagtttggcatcatccttaggttacaggagaccagttgtcatgcagtctatgtatattttcaaggtacttttatttacttatagactttttgttctaaatctaggttgagtttttcagcttagttttcttattttgtgggaactttcactatgcaactttgtaatttggactgctgattttactagcaacctggaattggaggcgaagttgtgccgcaccaagataattcttttgtgtacacggatccacagagttgtactggtctctggattgctcttgaagattctacattagttaatggttgtctttgggcaattcctggatctcataagagtgagttttgtttttacctctatttctcgtgttctttcttatttacataggttcgcttagctaaacagacttatttttttccgctgctttatttcagatggtttagttagaaggtttatccgtggtgacaacggtataacctttgatcagccatccccatcttacgagcagaaagattttgtgtctattgaaatgaaagcaggctcattgattgccattcatggtgatctaatccatcaaaggttaatttcatctcccatatgaagtagcttgcttgtagtttagatttggctgagctctgaaaaatcatgttctcttcaatgtggattttgagatgcagtttcgagaatctatcctcgaagtcaagacatgcctatagcttacatgtagtagaatctgatggatgtaaatgggcaaaagacaactggtaagcctattatttaagttttcctcatttcattccaagtcttttcagtttgttctttgttcttttaacatggaatgttttacaatttaactatatgctaggatacaaagagcaaaaatgccggagcctctctatgttcttccttgattcaagccagtcgtggaaaaacactgtgagttactgtttatcaaatttcttttaagatcactatctttgtgagaactatgaacagtaataagaacatggctaaaagggccttcttgtgtcgtttacttgttgaaatacaatttgtttcttcttggtctctgtagttctgtctttaaataaccaaactctgtggtcaataaagtgtgacagtgattacttgatgtttctttgaattcacagtaattagacacaagagtaaggactcataaacagttaaagaggtagaagaaagtttgagaaataagtgaccattggattttgtttgaaatgttattgtgattggaggaatgggacaaaactatctctgtcctatcgtaattgtaccagggcaaaagaaaacgtgggacagagatcttttgagttgcagaaacaatagagtcaattaaagagttatggtcgtagtgataaatgctttgtgtagttgtcttttggaagtgttcttgatcctctctctctcagaaagcaatttgtcatacattcatgatcttaaaagtacaaaagatgggtcgatgttctgtttctgttaaattattatttcagaattttgcacaaaaaccctcggaaactatagacattatgagtaatcctttatgtgattaaagaccatttgaacaacacatatctatgagtaaactcttttgtttccattaaattcaaaaaataaatgaggaataggcaaaacattaaagatgttttgtcttcattccatcaaaactcaaatgtagcctcaacggtacgcacttttttgataataaacctcacatttgctaaattctctgaaaaatctaaagtggttctaaacacagtgcaatgtcagcatcgaatgtctctcggagagagtcgcatataaaattgcagtggaacaagaaaagaaagaagaaagcatgtgaacaagtagaaaaacatcaattactaacaaacatctaattaatatatattccttacattgacaaggaaccatcgaagctttcagtttcactttcagacatatgtatagatagttgcaactccaaacccaagccccaacatggtccaccttctcatttgggtaataactaacaataataatcttcaaacgctcctatataacatttactacacgtctccatcttcaaacgcttctcttctattataagaacacatcacttaccattcgtggacaaaacaacaaataaaaccttcattaaagtcctatttattattcacacatgggttttttgtttcagttcttcagaggcatgaactcgtagtagtaacagtagttgcatgctttcgtcttctctatcaaccggcctgttttctcttggtactccctaaccggaaagagatttaaagtccggttgtccctcgtttcttcttcttctccgttgacattttcgtcgatattaatctcttccggttgttgagttatcgaccaagtaacaagatttctccatgtggcgtatttaccaacctctgatgccctctgatcagattcttcagtcgtcccatgatcttcattattagcattgttgtctttattgtaactcgcaggatctaattcatgctaagcagaaaaatacgaaataattaattcttttaggatgagcaaattccttcatgagctagatactacaacaaaataataaattattttcgggagacgcctattaactattctaaagtgaaatgataatacatatcaagtcccaacatatgatgaaatggattaaaaaaaaaaaaattatggccttttgaaaacatctttgttaatttccttattgttctcaagtcccaacatatgatagaaaaagcttctctataactctattctgcaccctatttacttgtctccccaactttccacacatatttagttatttacacttatatatacatctatgtattgttttggtcacctatttatttatgcatgcatgatttgtgagtatctttttacatataactattacacgtaaacataattcaaagaaaatacctgtggctgtggtcggtttgtgtgtggaaaagatgggcagagctttgtctgatcaactcgatgaccacctgcaattgtcacgtcatcttacatatatctccgaaattagcatgtatatccacttttaagttttaaggaacgttccatcaaatttcatcaattttgatacaaaccaaaactttatatcctcttaaccatttttaaagaaatattcagaaccgaaggagatgggtatttaaatctctagatataaaccgaactaaatatttatcgtacctgatgatgaatccttgacgtctttatgtggtttgataatagcaccaccttcacgacggcggcgttttagtctctctctagccttatgattctgaaaccaatagaaaacgttcttcccttcgattctcccatatttacgaagcttagatgctatctgttggatctgttccgtcgtcggcgtccgtgttccgcttctgtaaagctcttctagcgtcgtgatctgctctggcgtcggattccatctcaaagtcgccgccgcaggaatgttgtttttccgttcatcaatatcgtgttctcctgatgatgcggttatgagctgatggtgatcattgccgttaatatcacctgaaaaaaacaaaaatattaacacattgatatgaattaagtctataaatgaagaagtaaggattttattacagtgggtgagaagaagaggaggttgagtagtagagaggggcaaatagttgatgaggttgttgttggagatgtagcccatgctatgtagaaatttgccctaataactcttaatttagagaaaagattcacaaaataggtcttttgttgttgttgtggaattccgaaccttttagctagggaaatgggattcgagagagcaaatgctcgagtttcagtgctgtgtggaaatgaatgatgagaggtttacttgtgatgcaagagagatgaaaaggctaccaagagattgtttttcgggtctactatactttgccttttgtcctgttttatagataaaccaaaatctttatgcacatgtgacatatatgtatatatagagagagatatacacttacactcttgtacttgcttgacaatagaaataacatgtattattatgcgtataatttgcaagatcaaaaggaaatgagtaaacatgatttcaatatggcgcgaaaactttatcgagttattacaccaaaatttaataagttaataataagattagattgggtttacgaattacttttggactatgtagaacttttgcattcttcttatcaaacaactctctcagaaaattttattaccaaacaaaaaaaaaaaatctcacaagtcacaacctgagagtgtttcaggaaaatcccacgcgcggtcctcacgcgggaggcgcgttgcgtcataatcgccagctatagtccacggatttaggccactttttagcaaaatccacaactgagcccaatagacgcgcgtgggtcgagttttttccttttcccatcttaaatgggctttaaattggactaatcaaatcaaacggaccgaatgactcgttttgtagcccatattacatgttctaaaacagtaataaataaataaatattctttctgttttgtttttgatttttaggttttctatataatattaattgattattattgatgaatatcaaatttcaagataaacaattaaatattattggtttagaattaaaaaaaaaatataaatcacaaaaataatatatttataatcagcttttaatatgttttttcaatatgtgtgttttctagaaattcaagtattaaggaacagagggaatctatcaatattaaaaataccatccaaaaaattgaattttagaagaaatttctataattttgttaggatgaatttgttttgagaaacaaaatggagatgggaaaggggggtagttgaataatgagtaaagctccttaaatctctccatttatggctcaccacactgtgcaaacattcattccacattcaacaacctctctctgaggatattcctctttaaccaaaatggacccaaattttaaattattgtattcataatgagtaatagatttcaaggatgaagaaaagaacatttttattttgatctaattatgtatacattttgatgtgtttgttgtttataatcaatgtatattagttaatgtaataaaaaaaaacagggacaagtatcgaagtttgcatatatttggtcaaatattaatttggttgtgtataattggaaaattctgtatttaaagactcatataccttaacaaaatagaattttaatccgtgagtgaatagtagtaaacaagtattcatatatgagcattacttatgtttgtacgtttgtaaataatactcaaaaaagagagaaaaaaatatagaggggaggcatcaccatcgagagaaccgtatgcattaagttcaaacacattcaaatgatacaaattttattaaagctaaatggcctactctattaaataatatctttttccacacgtcacaataatcatttagcagatttttcgcataagtttattgtacgtttttttaacttatatctttgtgtatggacttgttttcacaatagattagatgtagtcaatcagaatatgtaattttgattaatcaaactatacattgattatatttactactaacaaaaagaaaatactttgatttactaaaaatgagtatgttagatttagttttctaataattgcatttgtaggctttttatgatataaatcttggaagttccgaatctttgattcataatctttttcaatgtccaaattcaacaattaacaatactacgtgtaagctacaaatatagttgaagtagtgaccttgaatactttcaagaaccactagaccaccacatatttttggatccataacttttgatcgattttatatattgttaggaacttttagggcacctactcagcatgtatatgatgattaggctgaatttacatccatggccgttttaaaaagaaagatcggatgcttaatgcacgacctaagaagtatttttcacctagagtctaccatattctagctagctttataatatgtaggaaaaatcgaaaatgcatgagtttcacccaatttcaagtctctgcttctccctttgtcatgctcgaaggagcagtcaacaccttccatgttcatgtatttataaatttatcatttaacaatacacaattttggacccattcaacattgattttaataacttatatgttatatggttaaataacaataattaatcagtttaacacaaaaagacaaccttctttttctgcatagaacatgatcttcgaagaaatccatgcattcgaatcttcaaccattttttttttcttgcttacaatattagtatataaaaaaattacaaattccgaaaacatactgatttaagtaaataaatacaaaactatataatcaataataattcattggatcttgatgatagccattgaagcaaaaggagttacaacaagtgagaaacaagatcattaactcttagcctcacagaaaattaaacaaggctaaggataatgatccacatctcattatgactaaaacataaagattgattcaaagcagaatctcaaggcagtttcttggagagagaccagacacgtgttgctaattagtgtttcagttgtgaagaggatttggacctgtgtgaactaatctcttgtcgtctttataaacttcatctctgttttcttcttctcgacgttgacccgtgaacgacactgtagctttcggagcttgaaacgacgccatttcgtggaaatgaccagcctttctcggtagtgaaggatagtgatcaggagcaaaaagagctgatgaagaaataccaaactgagcaaaaacaaagattccacagaagaacacagcggcgtaaccggtggtgctggtggtgtatgctcgtctccttcttctttttctggaacaagcttccatggctgtttgatttgagtgaaaatagaagctttttatgagaagaccatgaggtagtgaaaaacagagtgttttgagtttgtatctatctctgttttcttgtggcagaaattggtttctctttttgtcggtgtctgtgaagtgcagagcaggttttggattcaagaaattgatgagaaaaaatgggcttttgagtaaactataataatagtcttttgaaataaagtgagtaaagtggtaaggagataaacccaaaagacaaaactcttttctttgtttgagtgaagtctaagtaacaaaaaagtttgtctgagtctctttggataatgagaaagaagaagaagaagaagaagtagaaagaggagaagatgaataaagatttttattgttcaatggaattagatttgtgtttccttatcttatgggtcttatcaaatgatcttgacccttgattcctgggagaaccttctcatatatctgtactgtgaaagttaatttatttatctaacctcctccaatgctttgattgttctcttctcttctctctgctcatatttttaattttattaatgaaaaattgcacattatttttcaaaattcaagccatgttgttgcttggagatggtgcagtggacagttcagtattaatagccgttgtccccggtaagaaaaaaaaaaacgattttatgttttctgagaggagagaaagagaaagtgtattgagacagtaaaaatcaaatttgatgatactaatgtaaaaagtgttttttactagttaaagcaagtagcttttaatgggaggattgattaccttagttttgctaaattgaccaaaaaaagataccgttgttgcagagtctttttgcttggaatgtcttgacgacaagtgagataacctctcttctttgttttgtctccatctctctctctctctgtctttcacgagaacttttttctatttcttgcttcttccatgtctctgcttttcaactctcagagaaaaccattaacagaggcaaactctgtttttgatcagtgtcaatagagcagcatctaattactgacatcaacattgaattcttattcacaaattttgacccttctttatctcctgcaaaaagggttcaatttcagttgtttttacatcataagagatacaatacaaaggcctgttaaatcagtggaatatactaagaaagatacaaaagccattagttggcaaaaacgtgtggtcaggtttaattagatctagatataattaatgagcaattaaagatcaaacaagcattaatgagtatagtgtgattgacttagctaccttattcaggcttctgacttgtgcagaagattaaacaaaagcttcacgatttgttgccatatgcaagtttagtggatcaggaacttggttttggatcaactggtcttttgatactattcaaagcttcagatacatttaaaatctgtggatgcatttctcatcagacctcttttaataataagagcaccagtaagtgaagtcaccagaactctttgcaagagcagacaccattcctgaagtggtgaaacctgttcttgtctcgcatgatgatttctgtcgaagtaagactggaaacaaacttggagaaagcgtggcaatcatcacaggttctcaagttcttcataacccgtataggatgtcccggtctccctttaatgagtccaaatgcaatagcgagcttctcactgtgatgactcagagaacattctttttcctccatttccacatcatgaaatactgaacacgtatctggaacataccccattttccttatcttcttcaagatttcatccaatttctcatatatcgcctttgattgcggatgtgatttgtctcctctattgaaaaaatggattttgccctcgaattcaacagaactataggctgcaacctttttagtgcccagcttcctcattttactccttactttgtcaacacaatcccatttaccagcagctgcgtagatattagacagtagtacgtggtatgaaccaatatcaggagctgtttcaacaagaacgtctgccactttctgccctaatatcatatcacgatgaactgcacaagcacccaacaaagctccccagataccggtatctggttccactggcatctttttgataaattcataagcctcctctagaagaccagagcgtcccaatagatcaaccatacatgcataatgctcttttctaggctccagattcttatcattcgactgaaccatgagactgaaatacctttttccttcattcactagtccagcgtggctacaagcagataataccccgagaaatgtcacgtagttaggtctaagtccctcattctgcatcgtagtgaacaatgtcaaagcttctctgctatctccattcattgcatatcctacaatcattgtgctccatgaaaccacattcctctgtttcatttcctcgaataataccctggcagcttcagtgttaccacactttaagtgcatatcaagccttgcattttcgactattatgttacaatcaatctcttctttcctcgcacgatcataaatttcttctccaatctccaaagagcctagctgaccacaagcagaaagcatactcacgacagtaaacgaatcaaactgaactgcatccgcgcacattttgttgaaatactcaagagctatagcggagttccccgtttgaacacaaaccgcaagaaacgcattccaagccactaaatctttgacttgcattgactcaaacaaaaactcagccgaactcaattcaccaaacttcatgtacatcattaccaactcagttgcaacaatcccaagacacccaaaaccatatttcaccacatgggcatgaagagcaaacccacaggaaaaatccccaagctgagagatcgctttcaccacaaacgggtaagtaaattcatcaggacggacaccaagatcacgcattttcttataaagtaggagactttcaaaagggagctggtttctaacgtaccctttgaaaagagtgttccaaaggaagatcctcggcttgtgcatttcgtcgaacacctggcgtgcgtaacacatgtcaccaataactacaagattctctaacagctgagttaaaagactgttcttttcagagaaacctgtccttagtacaatcgcatggatcttcttaagctgcttcggctttgaagaacttgctcgtaagagctcggagagcatttgttttgttaatggcgtttgtttcgcaagcatctcttccgtccttcctccttactttcaagtgtcttaaaatgtaatatactcgtctgatttttacaaagcccaatttctacaataaaaggcctaattaagtaagcccaaattagatatattacaacaactatgggcctaaagacccaatgacccaaaatcgtgaattagctcgacgccgactggatgttcggaaaaggtttaatacctatctaattaattggatttttgatttctgtattaatgtcttttttttataagtattattagtgttgcaataaaattagtatgttaaaatatatattttaatccagccctatattcatctatttactgtaatttttgtattcatctatattttaatatgtatgaatatatttataaattccattaatttcttaagaaaatagtaggtccaatatcatgccttaaagaatcttaaaaatagtagaaccacaaaataatggtacaaaaaaatgatttcttttgttttgttttgtggttctacgaccatttttgcaaaatgtaaataattttcagttgtgtgtatattatatatctaattgcagcttcattgtaaaatgtaaataatcttcgattaattttatacttttatttttttgggacggtttttgtgaaccaaaaatattgtttaggtcttgaacactttcatagactacatataatccatcaagactggagaccggagaacgtgatgattatgtatgataggaagactgtaaatgaaaaaatagatgacatggacattgctaagattgaacatggacattgctaagattgaacatgcaccattcttgagtcaccttgccagaggttgttatgtttcttataccttatattgatttgataaactaaatgatatgccgtaattgtcaacacgtgattgagttttcaaacaatctttaagaatgcatgtgtaaaaattgtaggtgagcggagtctgggtctccaaccactagagcaatttgacggcaaaaaggaaaccactgcacctgattctcggtaatataatctccaatctcttttcaatttttattccgctgattattcgctaaaatgtatatactccttatttgttgtctgatcgttaatgaagtgcttcttcaccccttttttgaccttacaacagttattggagatgcaaagtagaatgtaaagctagatcgtaatttcttagaacatagcgacaaaaaacagtgtaaagaacttgaacgctccaaataatagctacatatatttgataaaagattacaagtatgacaatgtgattgatttgttaagaattattcccaacattgtgcatcactttggttgactcccgaaaaacataaaagtatgttatttcaactctaattatttgtccatatctagaactagatcggaactttctacacaaaaaaaaaagaactagacgtgaaataatgaaacaattcaatgagaccttattagtgttgtaataaaatttagtattattacttattagtgttgtaataaaattagtatgttaaaatttatattttaatatagccctatattcatttattcactatggttatttatctatattttgatatatgtgaatatttgtgggtccaatgtcctcttaaaggcatgttctttgattgctggtttgattataaaatcatttttcttgtaccatttttattttgttttgtgatttttcttccacttttgcaaaatgtaaataatcttcagctatgtatatattattagctaatttggtcatataaacgtagcttagtctatagtaaattaatcatctacatatgacttatacatgcataaagtgagtataaatgtatgtttacatgcgtaaatcagaagaacctaaacatatttcatttagtactacatgttattgatttttctacctagacatggacgttgaaccccatcaacatattaaattcattgtctgatattttctcagaacatatatacttttattgtttttctgccgatgtggacaacaaaagcatggaatacgttcgaccaataaatcttcgtctcttatttgattaatgtgagtgtatcaccaaaacttgaattatttgccatttatttttatatccgaccgtggactataatttctttttattatttggttatatattgtctccgtttttggtttaaacgtcgattcaattttgattgacatttgaatcgaagccaaatcacgaaaacacacattcgagaaagcttagaactgaaatgaaagagtgcaaaaaagttacaccaatataaagttgttgaaatttcggaatcttgtaagattaaaagattgttagtagaaaaaactcaacctcccaatcaaaaattacaaaaatagtaaaatattcatccacaaatttcatttttttaaaaagagaacattcacacacacttctagattgatcaaagataaaacacttatataagttcgactaaacctaaagatattatcctcattaattagtcacaacttccccaaccaatttcttaagtcaagtaattcctttgctccggtggaggcattctcaatgtttaaggaattagtggcgggaccaagaaaaatcttatcaaagtcaaacaataaaatggagacaaaattaagtgcaaaccttaaacttgaacgggtcatacacaaccaaatctgccaaaaaaaaaagtattttattcaatgaaaaaaacatatattctataaaatttgaaggcatcattttcagttttttcaccctcttctcataacgtaggtcccgaccatatttgagattttatccatcataatgaaaaatgaactaaacggctccctttcaacaccacattaccgacacccaatcagctttaaaactcaattctatggttcatttattttgaatctaaccatattattaagatgtggttggcttacacaatcaatagttatgtactataccaaataacttattgaccaatcctataaagaatcgtttcaaaacacttttagaaagatgctttactttctaaaacgatcgttttcagtcaggttttctatcggttcacctattttctcttttgtagaaaggcgatcgtgattgttaccggcctcactaaattatggtttatatattataattatctatggattgattatgatttcctaggcatgtacgtacgtaatattttttttgtgcgacgtttcagtgaaagtgtagttgatagtgaatgtttcgagttcaagttataaatcatatcaatagtaatccaaatctttttttttgtgatacgaacttggtaaacgtgaatcacattttgtaataatgcaagatgacagaatcgtggtaagaaaaagtaactaatgtaacttatttttacgttttaaccgttatattctctatataaacgaaggagaaatgaaagtattcatcaagtaaagaaacaaacaaacaaacaaaaaacacacttcactcgctacacaaggaagagagatggcgacgtcaggaacatatgtgacggaggttccattgaaaggatcggctgagaaacactacaagcggtggaggagtgagaaccacctcttccccgacgccatcggccaccacatccaaggtgtcaccatccacgacggtgaatgggactcccatggagccatcaagatttggaactacacatgcggtaaaaatatacacttattttagttatataactcacgtctgaaaactagagcttggaataatactcgaggttaatcacataaaaatgaatatatagttgtacgactttgtcacaagaatacagagaatccatttttcaaaaggtttcactgcatatatgtaaactcatatctctctaaatttgattcactttattaatttatgaacccgacaaatttattcagaaagcttctccaaaagtagatctgcggattttttcgaaaggaattacaagtaacaactacacgtgatggaataatctctttaccttaaaatttagttgagtgttacatatattatatatatagttccaacatatatatgcactttagtacagaaaaaaaaaacatatatatgcatgttgctaacttataaatggaacacatatatgaaaagatgggaaaccggaggtgttcaaggagaggagagagatagacgatgagaatatggcggtaacgttcagaggactcgaaggtcacgtgatggagcagcttaaagtgtatgacgtcatctttcagttcattcaaaagtcacctgatgatatcatctgtaagatcactatgatctgggagaagcaaaacgatgacatgcctgagcccagcaactacatgaagttcgtcaagagcctcgctgctgacatggatgatcacgttctcaaagcctaaatatccctttcacatcaacccatcatcacctaatatcatgatcatcatcaccctcatacgtacattgctccttttgtgtgtgtgtgtgtgtatcgtttttatggtgttttcaatataataaatgggggtttacatgtatggtttcatctactataatatgctttgatgttgtttattatggttgaggtttcatgtatgctcatctacgcatgtatccttgttaattaatgattttcaagagttatcaatcaatactgcccttttttaaagtgttgcactacgtatgtatcagcttccacaagctcacattgtatacagcatttgtggttgtattattcatcattttgtacgttcaattatggttattattcatacacagtattcattatatttatagtggttgtatagtatatttagttgctgttgctgtctttgtatgttcatttagtgtatagtaattaatgctgactttataagttcatatagtggttgtaacatttatcatttctatgagtatatattattactcatgtcctccgaaattggacaacatttaaacgatacaagcaaggaagacaataaaaatacaaaaatatttccttcgaaactctagtaaagaaagcatataatgaaaccagcatttagcaaagatgaggggtctatgtgggatgggggtcttgttggttcaatgatgtaaaaaatcattacgatttgttttaaggctattgtttttaatgggttgatatatgaatgacgaggacaatggtcatgtatatggattttgtcaaacctactaattagaattgtgttgtatgataagaacttggaaaacgtgaattatgtatggtatacagcacaatcgcaagtatcagtaaatatctattaatctaacatataaattttgagtttatatgattctatatatctttgtaaataaataatgtttatgctgtgcttgacaaaaaaaatgattatgtgtacgtacgtatgctaagagatgatcaaaattataactagagacattattagagcaaagtaccagataagacttttaaagatatttggaatattatatgaaatatgaaagtatcagtttaataaatactaaatgtagaaaaattacaatcgtgacagttagcttaactcaaactttatactaaaaactatctatactattaattgggaatcatcggaaaatttacaaccttttgaaacccgcacgtatgtgcgggtcaggatctagtgattctttaaatttggaaactcgaatatctcaaacgatattaattattcaggatattgatattacatggatggatcatggaaataaagcgacaaattgtttggagcagaatggtactatacatcatcaaatggagagacgtcaaccatgagaactgcaaatctttaagaagtctatcctcactacatgcagaagtggaagcgcttctctgatgatgaggtgtatgattggcgctaacaatcaagacgtagcttttctaatagactattcagatcaggtgaagatggtgtctttcctaaccgaatgaccagccttctcagtgtatttggaggatttgaaaaacgacaatgaagaatttaaaagttttcttttatctttaaattttagtacaaatgttaaagcggataatttggcacgaaaagttctataccaaatcacatcatatcacatatgcaaacaacattcttcgggaatggatctttaatttgagttctaactaatatcggttgacaaaagaaaaaagtttagaaataatattatctcatttaaactagatacataaatgaaacaacaacacacccatacacacaaaaagcgactctattttgttaaatagatgaagagcctcctctagaagatgaagtgatatctctagaaccagcactttcaacctagccacatagtgatggattgattaaggacaacacctcagaaaaagacttgtctatgccatgtatactttcgctaagaagtaagaagggagtgatttggcgccaggtaattgcaatgtttgaagcggtctttttgggggtctagctacttcatccttccaactgtagctatcttgagtctcagggaagatcataaccattgtgagcttgtagaaaaaggcttctacattgtcactgtgggcactcgtgaactgccagccaattttagaggtctatatagaatcttttttatcaagaaaatgtgtataacatataagagcaccctcaatagtgtatcttagcaaaatcttaggattaaaagcaattaaaataaagcaaaccaacaatccaaagctaagaagtgtatttttctttagatgtttttcttaagttaagatgtttttcttaagttaagatgtttatatgtgttatttgatgattggtttaaaaaatgaacaaaaatagaagatattgttttagaaaaaatgaacaaaatagaagatattgttttaaaaatatcaatgaaagtcacagctggcaggaaatctacggtatcgttatctggtggacttttcggcattcaaggaacaatacatcatatcaacaaacaataattatggtttgtttaaggtttaaattaaaattgatgtatgcatttgtctactctaatccttatcattgattcattatatgcttctttttttgttggtaaaaccattatatgcattttgtcaaacctatccttatcttaataacaaacaaaatacattgtatgataagaacttggacaacgtgaaatatgactcattctaaatatattagcagtagatatcaaataagtataaaacccggctcatctattttacgtctaaaccgttacacactctatatataaacgaaggaagatcacacgtgaaaatagtcatcaaccaaagtaagaagcgcacacacacaacatatttctttcactacccaaagagatggcgacatcgggaacatatgtgacggaggttccattgaaaggatcggcggataaacactacaagcggtggagagatgagaaccacctcttccccgatgccatcggccaccacatccaaggtgtcactgtccacgacggtgaatgggactctcatgaagccatcaagatttggaactatacatgcggtaaaaatacatttatatggaatccaaagaatggtgctaacttaatgaatgaaacaaatatgtacgcatatatgtgcagatgggaaaccggaagtgttcaaggaaaggaaagagatagacgatgagaatatggtgataacgttcagaggactagaaggtcacgtcatggagcagcttaaagtgtatgatctcatatatcagttcagccaaaagtctcccgatgatatcgtatgcaagatcacaatgatttgggagaagcgaaccgatgattcgcctgagcctagcaactacatgaagttcctcaaaagcgttgttgctgacatggacgagcatgttctcaaagcctaaatccctttcgaaccatcgtcatcacctatcatcatcatcatcatcatcatcatacatctccctttgtgtgtgtacttgtatgggtgtttgaatctttcatttgcgtagtacaaaatcatttttaaataaattatggtttgagtatacagatgttacaatgggcctgggctaagcagatatctcaaattatccaaatgtttttcttgatcatgccattgaaatggtcatcaagaaaacacacttaattgcttatacatatatcgaaataactacaaaattacaaatcattcacaatagaaaggataaaatagttcactaagtgacaaaaaatttaaacgtcagtcatacccaaaatttagtcgtaaccgtatttcagagagtacccgaaccgttttcaaaaaagagtaaataatattgcatatgaaaaaattataacatatttttatcttattaaaagcaataaaaaaagctcgatgatacgtaaagttttgcgtctatcttattatataaagtatggttttcaaagttgctaattcatagaattttgccacgtgtcaagtcaaacaatcagatgtttatatgtgtcattccaaattttacttttttattctctaaaaaaataaaaaatcttaaaaagtaaacaaatttacatatactaatttatatgtctatatatttataaacaatttacatttattcaacaaaaggaaaattaacaaatttgtctttaactcatgtaatcataagtgaaaaataaaacgatcagatgtttacatgtgtcattccaaattttacttttttattctctaaaaaaatagaaaatcttaaaaagtaaacaaatttacatatactaatttatatgtctatatatttataaacaatttacatttattcaacaaaaagaaaattaacaaatttgtctttaactcatgtaatcataagtgaaaaataaaacattttgagaaaaatagcttagcttataggatttaacttttcatttatttttatttattaattttaactcatttaatattaatttgcatgatgtaaaattaacttacaagattacgacatatatacaaaatatattttcaacaatgtttggtttctaaatatttttgtggatttctttttttattattaattattagccctaagcgtttgggtattcggatcgggtatttcgggtttggatttttgggtttagaagtttaggacccgttaaggtaatttaagattttaggtcgggttcgggttcgagtttatttatatattgaaatatcaaattttgtgtgcaaatctattaaattacttgaaaatttcaaaaattcccaaaacaacacgagtagttttgcttgaatatatctaaaaatacacaaaataactaaaatatcaaaaacatcctaatattttctatatataagtataaatataactaatatatacttatatttgagatatgtttgaatacctattcgggttcgggttcaagtttttcgggttttgaagtttagacccgttcgagtatttgaaaattttgggtacacccgcctaaataggcgggccttatctagttcttaaatatattgtagttattaaataaccataaagcatatttaaccgtaatcgttgtaaccataactgtattcaactgtaatcttaaccgatggttaataaacaccgtggtcatgcctacgcctacgtcatagaagagaatgcaaattgcaaaagacaaaacaaaatcaaaacagaaagtgagaaatcaaaaagatattcaaatgaaaacatacaaaagaaagtctcaaattttccagcttttcttcttgattatgccattgaaaatggtcatcaagaaaacatacttgagttgcttatacatatggaaacaacaacaacagattgatacacaacaacaaaaaaagaaagaaagaaagaacaataataagtttaggtagaggaagagcctccacctttggaagaggaagtgatacctctgcaaccagcaccttcatgccattcaagcatgatctcaatctcgccacattcgacattgttaagtctaaggatcaagtcttgtgtgatcttaccattgttccaaacaatgctactctcatcagataaacaattgtgccttgatggttgaacccttttgatagcacacccattaggtagcctcaaaagctccatccccattttcaaagcctctaagtatggttgaatgtctatgttcgcatctcccattttgtcatctcctgtgaacttgtcccaatcaaacactgtctgaacgatttcaacaaaaaaacaacaatgttatccccaagaacagaacaaaacaagatttgtcttttgtctgaatcaaaagagagaatctttttaagtttaccaagcggattgggacattaggatctttgatagcaacagtcatttcttcattccatactgggttacaattttttttcaccacacgtgtcttcaatgtctgaaagatttcatttttggttttgtattagacaaaacaaaacagaggatttgaagaaaacccaaagcagaggaaataaaacagaggatttgaagaaaacccaaagcagaggaaataaaaacagaggatttgataaaaaaaaccaaagcagaggagataaaacagaggatttgaagaaaacccaaatcctgaatctatatgaacaattcaggaacagagaagaatcgttattcggagacttgattcatataaggcaatttgttctctatcgatttcaaggagaaatggaacctgatcggcgacgttgagaacgatgtaaggatcgctgctacgatggtcgcgaatggcgagattaatccctctcttgacgtggatcgtgagcaatccaagaggcttttgatccatttgagaagaaagactttttgactaggtccggtgctggagatggtaaaggaggaagaagaaaattttaagaagaatttggagatgatgctgaagatgaattggtgcttgtaatctcgtccccaactattcaacacgttctcgttcccaattgctcttaatttttcttttataaaaaagtttagcgaattatagtatcattttttcaaatgattgggtaacttgttgttcttaaaatttatttattcacactaatcaaaaatgattaggagtttaggacacgagactaatctaataatcgactcgagagataaaacaatagtcatggactgaacaaaagaaatatctcgtcacaatgggctcgacgactccctttatagataggagactaatctaatatgggtctacttttgaacgtcagtgaagtattactaccaacttgtaataaaatcacaataatgggcttgagtacttgattaacaggcccatttaaaagattttacgtttaagaatctttcaaatttaacaaacaaagagattattgcatggagagacggttttggtgcttgtaattttttttcttttttttaataaaatgttaaattatactcaaaagaaaaaatgtcggttgtacaacgagtgcatcatggtgtttaagagactaagcgtagagctaaactttacaagttaactactagattttaaccaaaactgaaagccttggtcatatcttctatcacccataagtttgattgctgaaagttgatcacgtatttgcttatctatccatcgaacaagttgagctgcttgattcgggttgcgcccatgcttcctcctattgcgctcacgccatattgcatagactgaaacttgaaagatataccgtgcgataaaactttctactcgatctttccagttttcttgaatctttgtgagtaggtgtcgccaatccgtagagtagcttgacttgtagatgctttttgctgacatttcccaaacttctgagctaaagctgcaagagaaaaataaatgatctcttgattcagttgcatttctgcagagaagacatgtcccctgcaaacctctgttccaaagaagcattttatctcctgtggagagcctatcataaactgcaagccaaacacaaaaagaaaacttcggtgttgagtgagtgaaccagacccccttgtgccaagggacctcgatgcccattgttctggtattgttccacgtttccttcgtcgagaaacaatggcggtagtcatcatttttgcctttccaaagagtaacgtcatcatttccatttctacgttgtcgtgtgagttcaagagcctcctccatctgattgagaacattatccctgtgtcgtctttgacgtctaccattccatgcctcctcaagagtcatctttctactgatccccatatctattgtccctctatctccagcaatttcaaccagcctgcccaaggtagaccagtcatcataccagaaaaaagtgttgcggccagtgtttacttcttttttgcaaaactgcttcgccatatccttgaacttgataagttttcaccacatccatgaacctttgcttgtcgattctttgatagaccaaaaactttccgtgtttaaaagataagtctcaacccattttacccacaaagaatctcctcgagagagtatcctccatatcagctttaaacaactcacatcattcgcctcctttatagaccttaaaccgagtccaccttctttcttcggcttacaaacatcgtcccaagctaccttagctttgtgagaatttaaatccggaccagaccagaggaaagtagaacataacttatcgatttctctgatacattttcgcgggagccggaacgcagcaagccaaaagttacaaatgctccataggaccgagcttatcaagtttaagcgaccggcgtaagaaagaaatctagctgtccatgacccaatcttctttttaagctgttctatgagaggtaagtaatctgcagcggttaggcatttggttactagagggagtcccaaatacctcaccggtagagtccctacatcaaaactgaaccggtctttgatccattggtgagacacttctgaagttcccgctagatatatggttgtcttctccatactaatttttaaacctgaacttttagcaaaaacgtcaaaaactttcacaataccctctatagatcaaacttttccgtccgaaaggatcatgagatcatcagcaaagctcaagtgggacagaccaatacttttacaccgcgggtggtagccaatttgctttgcttctgttgcttgatcaagcatttttgatagaacatccatgcttataacaaatagataaggggaaagagagcaaccctgacgtagacctcttgaactttgaaaatagcctgccaattctccattgacttgcaccgaaaaagaagccgtagtaacacaaagcataacccaatgaacaaactccggtggaaagtccaaagccgacaaaacgtttttaagaaatgaccactgaacagaatcaaaagcctttgaaatgtcgattttaatagcacatcgacccgaaattgtgtccttgtgatagtcctttactaactctgtggctaatagcagattctcaattaggagccggtcttttacaaatgcagattggtttcccgcgatgaaattcgggagaacatgtttcaatctatttgcaatgatttttgagatgactttgtaaatgacgttgcagcacgatatcggtcgatagtctttcatttctttcgcctccagtttctttgggatgagagctagaatggtagtattaacaccctttggtagaaaacccttttcaaaaaacgatttgactgccaaaacaaattccgcaccaattatatcccatgcccgcttgtagaattcagaagtgtaaccgtctggacccggagatttatcatttggcattgagaataaggctccccttatctcttttgctgaaactgatgcagtgagcatatccttttccgctggggaacaatgataaggcaatagagatgttaatttctccactgttattccctcataatcattcgggattagctgaagaaattcttgaaaaaacctttcagtctcgttcttgatatcatctttagttgtggcagtactaccatcttccttctgaatttcgcgaatagagttttgagctgctctagcggttgctgcgcgatggaaagttttgttgtttttatccccaacctttaaccaatgaagctttgatacctgcttaagatacttctcttcaatgctagctatcctgtcccaacgaacataagcttccgattctatttccatggctctttgagatggattttgtgaattactctgttgcgcctgacaaagactgagataggcttctctcgtccttttcaccaaatttcccattttttccttcgccaagcctcgaagttttggtttaagagccttgagcttcttagtgaaccggaacagggacgacgtggacatgtgtataggctctgtttctctccaaaaattttccaccaaaggtttaaactcctccatatcggccacagcattcacaaacttaaaaggcttatttcctctcacttgtgcaccagagttcatatttaaattgatacgacaccgtaaatggtcagaacaccctcccgcttcaaaaacattataagattgtgggtagaccatcttccaagcctcattcaccataactctatccagttttttccaaattgggtcattatctctcttattgcaccaagtaaaaaggggcccgtgagatgccaagtctgagaatgagcagtagttcaccaaagactgaaaatctcgcataccggaggtaactgctgggtgatcttccattcgagagtgctcatccatatccaaaatctcattaaaatctccaaaaattatccatggtttatcacgaatgatcggagagtccatatggtctcgaagatcattccacaaaatctttcgttcctctgcaaagtttgaagcatatacaaaagagtagaaaaattcttcttcttggctttctagtttcaccgaacaagttatcaactggtcactcttgtaaaacggagtaaaccttacattctccctccacactacccaaagacgacctcttctattaaactcatagttagttagcatggaccaatccttgaacaacttagaacccaaccactgtgaattttcctccttaactctcgtctcaatgagacaaccaaactgaaaattctgctcgtccacccatttctgaattacggaatgtttatttgatttgttgaggccgcgaacattccaaaagaaacccgacattaatgatgttttggagggagccctttactctgatctttaggattattcctagtagaagggtttgataatactttatgtgctgactttgatcccctaggcaaagaatgacgcaaaatcatctccttctttgctagtcgattctgattttctaccttttcctgaggcgggtcttgagttgagttttgtgtttcctccgcttgtttctcaacactatccgctgttatgatgtcctctccactttcatccttaccattcagagcagagtaactatttgatagaatagagacctccccaaattgtaaaccttcttgctttttcggtggactacgaccaaatttaggggtaatccatgactcagctcctttctcttcttccttaccatcttcagagattggtatgattggtatattctctgtcacacattctgcagtcacagaggctgcagtctgagaattagacaagacctgacccgtctctgtttcttcaacatgaattgggtctggatttggcgtgtctcgagagcaggtttttaaggcagagagacaagagtcacggaggtgaccccatttatcacaacaactacatcttggtggtaaccaagggtaggagtattttatcactgcagctagttctccctcctcctcgccggtaaacacaaactccttaggtaactctttcgttaggtccgcttccaccagcaactgagcttcatcgaaactcgaacaagattcagtcttggggtgcaatcgaattggcttacccactgcactagccaaaaactcaagacctttatcagtgaatagtgatggaggaacatccgttaaagtgatccagagctgaattgacttcatagctggctgagtttcttccgcaaaaggagaccactttgacaccaccattggcaaatccatgatattccacatgcctctgtttaaagctcttcgtcgcatggcttcgtttcggatacgaaactttatcgtcgagtcattgacggcataaacatcaatcagatttgacttgtcccccaatctccaaattttattaacgatcatgtgaattttcccaacgtgtggggcctttgcattgagaaagtgaccaattagaaaatcttcccatagtggtttagcaccgagaaagacctcttttggtactaccaccgtcgcttgaccatcaacttcttccgatacgaacttttgttgagtgaaggtgtgttttcgagcagcgtttacccacgatttcttcgcaggcggatgtgacatcctttgagtcgtctctaaagcactctgactgagtgcaggaaactggtctgaatctgagacaagtaaaaccctatatgtgctttggtttgaaacgatgagatcaccgtcctgtctctccaaagagaccggagaagatacaggagacccctctcgcaacggaacctctccggagaggcctggaggagccgccgccggcagcatgcttgtgagaaacgtaagaaaaccctagaacgcttcttttttcgcccctgccacgtcagctgtccttccgacctagtaaagacaccccttttttaaaactggatttccacgaccacaaggttaagagccttgcgctctaccaactgagctagatgggctttgtggtgcttgtaatgggtttgtctttccttgcggaagaagaatcgggtcaaccattctcatccttcctctacatcaaaaccctaatttctatattacatctctaacctcattcatatttgatatataacaccattcatttccttgatctctcactcatcaccctcacccaccaccaccatcaaaccctagttttgtttttcccccaatttcgtttccttgatcgtggatcattcttgctcagatctctgttagcgtctttgaatggtagaaacaactccgatcaccagagaatatatgctttcccattgcacaaccgcaagggcgagctttttccttcgtcgtctctccgccgcatcttctttcaaatttggcttctccaaagaaggctggtactaccgttgcatcggcgtcgacccttgaactcctcaacacggtttgtttttttaataaacctttctgattttgaaatttgataatgttgtacaacaacaagcatcagagaaaccagaaatcgaagactaccaacaggttccttgttagcatcaatgtcttaggaagtgctggtccgattcgtttcgttgtcaaagaagatgaaactgtatccaatgtcataaattatgctctcaaatgttatgttcgtgaaagcaggcttccacttctcggatcagattccagctttttccgactttattgcccttactgtgcctctgaaggtatctacagtttcctctttgaatttgtgacttttcatcagttttactaaggttaatgtttttgaatctcttatgtagcattcgatccataggggaaaatcggttcaacgggatcaaggaactttgtgttgtctaacaagttagagactcaaaaccttgaagactctatgatgacaacaacaacaacccggaagacttcagggagatggaaggcttggctcaacaagtcttttggccttatggttccttctcattaagatcatgcatcacaacatttttgttctggtttttgttgtgattggccatacaataatatggattgagatttgatagaatatatatactggtttcttctcttttgtaattggtacatggtaacgtaaccaacaatataaagtctcatagagcttaggaatatattctggtaatcacaaactaagcatgctaatgtaagaatatgctctctatcaatcatatagtgtatcttcttcgttggagttgtcgctagcttgattccccgggatgtccattctcggcatttcttgttggacttgttgattcagatcatgaagcatctctgcttgttcataatcacctctcacttgtttccatgatctctgtttcttgagggctttagcagcagaaggaggtggtccaagtacattactaagtagtttgtgtacttgttctatgatactctcaagcagtcgcattctagttgaaatctgcttcaaaattatctcagcatcagcaataggtacctcagccctctcaacatccgcagaagtccctcttgctaaaaggagacaaagacaataaatgttgttagcaaaacaaacacaggatgagaaactgaggaaaaacagagaagttttgattacaaggagaacatggagcttgttgtgacttttcttgtttcgctttctttcgagccctgaaccgccttgctttacttgaaaccttctccacaggaattggggtatcactagaattagcagtagctgcttcttgaggcacttgtgatgatgcatcatttggagcagtctcgatcactaacagaagcaaagaccatgtcaacaaacaaatttatctagatttcggaaaccacaataagaaacaagagaagtttaattacaagaatgaataggagaaattggatgttgcttctgtttatttttcccctttgaacgctttgctctaggtttgttatctggttttgtaaagcttgtacttgcctctgctaaatcttcaaaagctacacaacaataacaagagattcaaacaaaaagaactcaaaaccgattctgattattcgtttttcaggacttacaattttcaatctctacattagacgttacttcttcacctgtacccaacaaatgaaacttgggtgagaagaaacaaagggtttttttctagggtttattggtttctgttatagcttacttggtgcattctgaatattctcgcaatgtgttttgaaacatctgaagaaatctggatttgctttttcaagaagataccaaactacaacattaaagattcaatttttaaacgttttgtctcagacccattgatgatcgaataaaaatgaagttgcttttagatgaagaattaaccaaatctggtaaactttagtgagactccaaatgtatcgaatataaaactcgcagtttcttctttgctcatgtagccttgtatacattcctcgactctatagtgaacctgaaaacatagcaaagaaagaagagagaaattgtaatttgaatttggatcattcagataaaagagatttggatataataagaatgaatcttacgaaatctgtgagatcgttagagatttcacaacccttaggaagatctaaaacatgcggactcattttctgaaaaactatttcttctgatttcacagatcaagaaatctcttagcgatctttttctgaagtttgaagaaagatccaatctttgagaaggaaagagagattctgataagatagttagtcaaagaggtttaccgaagaaaaaatagagagacaaaaatgtgagcgggaaattattttgcttctttgattgattgaatatttattgactttcttatataaatgtgttgactgttgactgttgttatttgcaggtttttaaacatcggcccatttattcttattgggccgagatattattacacaattaatttaccgtatgtagcaagaaagtatggaaagcgaagttgactttacatgatcataatttataggtaatccaatgtatctaatccttttttaattacgcaagctatcatattatttaatactaaatgttatttatatatgtaattttagaaatcattttccaatagttcaaaaattaaatatagaagaatacttcagttttacaaaacaaaatgttattcatattattattaattttaataattttaatatttttacttacttatcctcagcagttgatttttttttgccgtctaaatttatatttattaaaaattatgagaattgttatatagacgattttaccacgaacatttctttatatcttttattagatttaggacaaatgaactttttttttcattatgttgatagacattttcaatgaattctctcttgtacatcgttggatatatcctacatatttgtctcagattctactaatagatcgcattatttgaaattcgaacctcatacttcttgatataaattattaatgaactatgagccaaggaatgaaccaatgagacttccacatccacattagttaattaaaaatcagatgctttcaaattatttatcaggtaatattttggtcaaaatttattatgccctttgttactttctaaatgtctagataatccgtcaaattctagcaaagacaacatatttcttctcttttgttcttgtatatggcgtgatattttattacttttgctggtattttttccaataaacgagtgcaattattttacattcgaaatcaatgtcttcaataaatgtgaaattgaatacaaatagatcgtcatgtttcacgggccatggcaagtaactgcgatcgaaaaatatatatacaactatgaaaggccattaattctttcttatctttgttgaaggagttgaattactatttcaaggactgatgactaatcataagccatgttaaataaaaatatccaataaagtttgaggaaaaaggtcatatcataagatgaaaaattgaaaagcaaataaatattaataaatgaaactgttcgtccgaaaaagtaataaaataattaatattggacctctcgaatatggataattcagaattaggtcaaatattacattcatttaactggtccttgacatacacgaataaaaacttttttagctatctttaaaataaacctctacaaatttttattattcttatttgaattcacacattttataagttactgagatttatttatacgtaaaattaatccatttttttttggtgatattactcaatttcacatgttatatagctgctataaaatgtaacccgtatgtcttacaaagttataattaaaagatataaatagaaaggtgagtagtatatttaaaaacccaaaaaaaagaaagtggcattatttaatctggtccgcctactgtcccaaataaatttctgacgttacacacaaatcaatggatcgttttcaaatattttcttatgcaaaaaatgatcatatggtgtaagtaaattagagattagaatggtgatgcgatcttgacagggttgttatatcgggtttaaagatttgttttgtttttaaaaaacttctttatttcctatcaaagttattacacaaataatattaaatgaaaattcgattcacactattataaaaatgtagaaaatcgaatcttgcagagaaataattgcagaaattctgaaattcaatgtttctatgtttctatatggagatgaaattataaatttataatagtatactctgtgatgaaatatttgaaaggacaatgatcgattaaaatatggaccctatgatataaaaaacttgaaactcgatatgaaagaaatatttgtttaaaatcaagcgtgggtcaatggagaatttgaacatacacatgcaagttggcaacttggtggttaaaaagcatttcatgcatgtgggacctttcttttgtatctaattaaaatcgcatttttataagataagattaataattctacatcagtgattaaaaaatgtggattattattcattattaatcaagattagtggaagctcctttggtccaataattgacgaagggttcattaatgtttctataccaaaaagtagaggtttgaatttcaattactgcgatatattagcaaatttgcagattaatggaggtaagtatgcaagagatctacaacaaaatacaattctaaccattcgttaagattttacacagagaagatattgaaagtgtccatcaatcacatgaagaagaagaataatgtgtggtctatcgtgaatctaataaagattagaaaaaattgttcgtagtaaaatcgtctatgtaacaattttcataatttataataaataataaatgtatatggcaaaaaaaaactgagattattgatttaaatttttgataggtcggttcaatacttttaagactgagcttctactaatttctggaaccttaattataataatcctctaactaaaaataattcgagctcatttaaaatacttaggagattatcttatttcaaaagttgttccggcggtttataaaaatatcatgtactaattacacataaactatacatctagaccaggttatagactttaatatatatctcctatgagagtctacgagactacacgagggtttgtttaacattaataagttacatacgcctgcaattagaaaatactaaacatttctaaagattaaaacatcggatctaaaagttgatgtgtcgatctaaataaatatttactatattcttcaccacaattcataaactttggcttttcgatatgattacagccaatgagaaattagttaaaaatatgagccaaaattgttaaatcacactccactaaaaaaagtatcaaaacctttttcatgaaattatcgcttagtagttagtactctttgtaacaatagttataactcactatcatccctttctctttctcaactttactttataaaataaacctcattaacaaattagaaatatctaaattcactaattattagtttattactgttcatacttagtgaagtcgataaaaaaaaattattttgccaagaaattgagattaataaaacttgatattaatttttttttaaatgagattaaaacatagttttagtttaaaattcataaagataatttattaataaatacaaactcagcctattaaaaattgatcccaaaaaggcataaattaaaaatgacctaccaaaacgatatatataagaattttaaacaagtgaacgaaaataaataaaataaacaaaaggcaaaacggttcgattcagttcggtttaggtcttggtccgaacatatgtcatcaccggtccactgatctcaatctcaaattcactcgactcgactccaccaccgtcgtatgcttcgagtcaaactcagtacgccgccgtcgagagtttccaagcggaggtggtaatgagtggacgagtgtgccaacccaacatcaaacatccattactctcctccacacgataaccttggccactattaaacacagacaaaagcatactcgcttgcttaaacgcgttagacccaagatgtgccggcgctaaaccggacgaaccaaaccggtttccccattgactcaacgtttcgtgtctctcgactctgtcaggaccttcacaagccaccagattacaaatctgtttccctaagtaaacttcagacatgactttgtcttgactattcggaactccttccaacgaatcaaacagagtcgaataataatgtaacgattcagtaaaccggtctaagaaaaccggtccgttatggttcgattcttgctcaaccaccgtgaaaatcaccggtttaatctgtttcacaacgccgagaactttctctatcccaccgggacgacctaagagcttatgtagctcaaaaacagagttcaccgcaacagcttccgtatcgctcggtctaagctcaagcatcgaagcatcgagatcggctaagctgttagcaacgaatccacggtattcgaattctacgtgaatcgcctccgcaagctgagctaatttacaaccaacttcatgaagatgatcagaattatccggcgccggtggaccaattccggttaaccggaaagttggaggacctccttctcgaagcgcaagagcttgcataagtgcaggccattgaagaccttggttcatcgagaaatcaatgacgtgtactctcttcttaccttcaaaagcttcgagaatcgcttggttcgccgtgaagtgagcgaatttaagataaggacaagtctcgtaaaagtgcatctgaagagtatcggagagacaatgatcgatctgattctgcggcggagagagacggtagatccgccgcgctaaagcttcggcgaagtaagtagccacttttctcatagctccggcttgagacacagctaagcatccgatttgcttcacaagagcttccgctagagtcaaattgttctgctggattgcttctgcacaagccataagcgcgtggactaaacgaacaccgttctcttgcgagtcaaccaggataacagaacgagttgactcacccgccgccgtcgttgtcgtggtggttgtcgtcaccgtcgttcctatgactccaccaatctgcgtacccgtcgaagtcgatgtaaccatagaatcaggactcgagcatgatttcaaacgcttgttctgattattcgacgaagacgaagaatcaatcgccggaaactgataaatcgcgtttccgggaatgactttaaggtcataatccgaagccggaaaaccacaaatctccggcgaaggaagaaccggatctaaaccgttagaactcgccggaagaggaggaggattaagctcagagagcatattatcaagccaagaataaagctccgacggattataatgaacagtatccgtcgcgagatgagataaaccatcttcttgaacattactcatcatcgtctctaattgttcgagtttcaaagcaacctccgccatctccgatgacctaactttgtaacctaaaacagcgagaagctcgtcgtccatgttacctccaccgtcttcttcttttttcaccatcatcatcttatctttagagattgatgatgatgaagaagaagtcccgtggttggacaatcgaccttggaattggtgatgatctctcttcatttttcagctatgagtttcgattagattaggtctgatcttggatctagggttttgccttttttttagtttgtgtgtgtttggggatgatgaaggaagaagaagaaggaacatgtgacttctctatgtgaagaatcttaagagcaaatgggtttgggattggattgcttttgtttttcactgctactaccacttcaatcatcattcataccagaactaataataataatttctcaaaataataataaaaaaatttctcaaaaaatatttattttatttaccagaaaatataaatttattaaaataaaaagatatttattctggatgaaaattaaaaaaagaaaagaaaaagaatggtggtgatggggctcgacgaccaatgaataatgtaccagaaagagtaacatacatacacatctaaagtgataaggctgtgaaattacaacacacattactaattttatttttattttcatatacgtaaaaaaaaataaagtgtgtaaaaacatttagaatttctgtatatttgaagtgatatttacattcattgtgatgtgtatttttttgttttgatttacaagatctgatggagtaatataaaaaattgtggatctactgaatagatatattatgagtttgtttttttaactatataataattttagtttaattgatgaagaaagtaattacaagtctaagagaatcattaaacttttgtcaaatctataaaataggagatttagggctttttagttgattcttttgatggaagaactgaagatgctctttttcagaggataattaaattcaacttaaaaagctgaactcacttcatgatagcatgatactgttttacttcccagtttctttatggtaataataatttaaccatatgtcttggatgtaaaaaaataatgatatataatcacattttgaattgtaagagattattattttattttttccaacaagttgtttgaagctcagccatcgaaaacataaatctaaaattgcgtatgatcagataaaagaatagtaaattttggttttaacaaaagtacagtactagtaattttacagtaactttaagtcctacaggttcagtttatgtacaaaaaaaaatctctaaaagggattctataattgggtattgaaaaatcatcggaccaatgtattttcaattttcgagttctcttttatagaagtaactttcaagtattaaacgttaattaggtcatattttttcttctaatttccaagatgcatataattttaaaagctttcataataataataaatatatatcgagatttcagatgttgtatcttcgatctttttaacttgacaaagttaacttaggcttatgctaatctactgttactgtcaaagtctaaataaaaaatataactagccacttaaaacttacgaaaacaacaaaaactaaataaaacacgaatgaaaacattaaatttaatgatatttgatgacaatattaaagttccgactatataaaaaaatcatcaagcaaacaaaacctaatagtgtaatattactaagcattcatagctcgaaatacaattaattaaaggcaaaaaaaatggtgtgacaagaaaacccgtttttaagcataacagccggcgtccgtcgacgtcaaatcattcaaagagattcccgttacattgcttaacgccgtcattaacggcctctttctatcaactgtattaaaaagaaaagaatatattcatttgtatccttcaggaaactcaaactgacagcacgtgatggatccacgtgttaatgggtcccacaatatagctttcaataactatacgcggttggaacttttgtggtctctactaaaattcatgagatttgaacacgtgtcctattattattagatctaaaacggtagggaccgagtctgcttccttcatcttgacggccgtttttacggatccgttttttttaatttcatctctatccatttgttacatgttatattgtcatgttacgtcactttctttaactatttatcattaaattcactttttttttttttttttttttgggttcatattaattttgttatttcttccatgcaaaaccatggttttgtttctgtacataatatttttaaaaatgttatattttaagtcttctccattttttataaacatatttttcagtgataactcaaatatccataacttttccacaatttctagcaaacatcactcccctataaaaagtcaattactagttactcgtagtcgtacacctcgtaatatatagttttcaaggtgtcaaaatcgaatttatatttttgtttttttttaaattacgatataggttttctttggcaaaagtcgcactttcagaattgaaggttatgaactaaaaacattttagcaaaaatgctatacacaaacagccattaatgacgatctagatagtcatgttattcttatggagctgtatggtatagattatagaataatagaactatagatggatgaggttataatgatcaaagattcaaagtgtgttgtggagctagatcgttctggtgcgtgagttttgaacatatacgacattgatttggtctgagcatatttgaatcgtttgggttatatacgtcaaacaattgtatactagcttagatttttttataagagttatacgtgcatgaatcgcaaatctgtgtttatgatatcgattgcacaatgtttgttatatgtgatctaattattgtatatgtgcatgagaattcatcgacctgcaaatctgaacgaatcaccattagttcataatacacgtattatcgtgttttttctttgccaactacgtattatttatgatttttcgttcgcggatacattgtattgtttgtgatttacttaatcaccttagatttgatacaccacataagatttgggtaaataataatgaaaacaatgataccgagcaagcataaatattgaccaggtgtcttttcgatttataaaaccatttacattatactttctaatattaattaagagtaatcaaaatgtacgtataacaacagacacatatgtgttggttacgctaaataacaactatgtttaatacacaaacactatattctttaaacattaatcatatgatattattagtagtactagtaatacccgacagaataattgatgtataaatgcaattttcctcgttcactgatatagattttaccaaatacagacggttaagacttgagaagttgattactatcacttttggtgttgatcattactgttgtgacgagtttttactgtaatagataatcatttatttttgttgcattcgtttatttcatgtgctaaaggtgccatagcacagggtctattccctttttttgtatttttctaaagaaaatagggtccaaaaaattttagttccaaaaacatagaagaaaatgaccaattttcctttttcagctcagggtcctaaattttaatgagccggccctggttccatgtaacgaagagcaactcctaaacatctttgccaagcttcgtatacgtactctttttgaaaattttattgtataaacagtaattagattaagaattatcaatttatgattatttcagctaaacgatttttttttttttttaatggattgcaatcaagttctctcattgatttctccttctggtggaagacatgaaatgaatatggtatcaaatcatctgtctttttttttgtaacgaccaaatcatctgtcataaaaataaatagcataccaaaaaaaaactataataattgagaaacaaatacatatatatatatatatataaatggattttaaaagtaaaaaaaaaaaacacatataacataccaaaaagctataataattgagaaacacacacaaatataaaaatgaattagataaaaaaaactaatttatacaaataaaaattatgaaatgccatcaattgatatgaggtggcagagagaccactcatagttggtagggggcacctaaattgcatgaattccagaattagaattattccctttacttttttctcacctaaatttgcattctattttattttgtaaagaactttgcattatttaacacatttatgtgtatatttaaaaagagagagaaaaaaggttgacaatggtgtgatttgaaggcatttacgaaagaaaaaaagcatatagcaaaagcctttcagtcatttcattaatgcagaaaattcatgattatcggaagcattattttaccaactaatttaaaacactgacgattgaatatggacccaaataatgtatataaatgtatcagttcttatgatattgtaatatttattcttgtcgaaaaacattccatttaattacactgcagatttttttcaataaaacttgttaaggaaataagaaagtagttacattatattattatcgtatgaaatcaaatttatgtggacagacgaataattagtactaccttaatactataataagaagtggaggcgcgtgttttgtacgaagcaatgaaagtcgcgtcaaagaaagacagcttgagacagcctggaattttgcatacgtgtcgtccaaacatggaagtgatcacctttctctcttttaccaccgccgctccggagtttgaactgcacgctcggtctctatgccacgtggcaatttctgtaaattgtaagtaaaccgtaaagtgataataattagtaaaatgcagaaaacatgatgaaaaattatcagaaatgacactattcaataattcattagaaaagtatcttagacttaaatacaatttgagatagcatcgctgaaatttttaatcaaaggacaagattatctaaattaaattggttcacaacaacaaaaactcataatcatataaggaaataactaagcttaaacacaagtaaatttttaggcgtattttttattgtaaagataaaaagttaatgaataattttattggcatattcttgtggtttgtgatcatttattcatttacattcttgtaaatggtgtttaatattctcttttttcattatatttatagtttaagattttctcacacatattaagaaaacacaaaaaaaaacttatttaatttttcttttgtttataaatatattattaactatatctaattcaatcaataaaaaaatatgctgtaaaatataattgaccaaaaattattaaatatatttaatttttgcatagataaatagaaacaaaacttattttgtgaaaagtatttgcttaaactacatacaatataatcaaaaatagaggacaaagggagtatgaaactgcttgatttttgtttagaggaaaactaataaaaatgtattttttcgaaaagtaaaatcttatgcaaaaaatgaaaaaatgaacattatattttgtgtaattttaccattaatatatttttttgtataaagctactgttatccatatttttcaattcaaggaatctatgcagaagtcggaacacactatcactacgcccatgtgaacttcacattcacatctcgaaattcgtttcccgaagtcctacatgcatgtgtgtgttaaaaaatctacaatatacaaaataaaagaattgtataatgtacggattacatgaatacacgtgcatggtaaaaaaagaaacatggtgaagagaagaatcggttggccagagaggggacacaaggctttaagataataagatttgagatctacgacgtcaaaacgagtgaaaacaaaactgttttatatatttatcttatcatcttcgatttgctttatgaaaacgacgatacgcaaaagcaataataagaggaagagaagtgaggactgaggaggaggaccaacaaatcatgctttcgttggcttcaggtgcaagaagcatgaagtccacatgaataaaagatggctcgtacgtcttatagacttatccatattgtttggtgtatttaataattccgtatttccgtgtgtgtttttctacttagccaatcaacataggtgacttttatcaacagaactcattttattacatcataatagtattattacacacagcaaaaagtaataaaagctggtctgaatggaattaaaagacatttatttgccgacatgtagaagattgcggcccaagaaggcgacatgcgcaaatctatttgataagactctgactcggaatctttagtcacaagatttttgcttggtctatctttcctctattatttcttctgatatggttggtttatcacttcactagtagcatgtctgaattatgtacggagatattttgaaactgatcgatgagattcagaatccaaatcatctcatgcatattcgttactacgatcactgactacttagaattctcattaaccgaatctattacacaacccaagaatgtatatactgaaaaacctaacccacatattgaatactgatcgatataatatacatatttttatcatcaaaaggagattcacaagattgaatactggcaacgctgatcactacttaacaagctaaacattgtttagtaattgattaaaaaaaagaacatggtttagtaatcatttgaatttgttcatgaccaatttcttattcacttgtacgtctttcagcagctattaattatctatagcttgttgtcaatctccatcaacaatttttcaagtttcttacgtttgtatatatagatggatctcgattatctaccatgtcttattcaaacaatctgcatcaaaagccccgtatcttttaacttttcatatgctacatataatttgattcaaaagtattcaatgcttttgcgttaaattagctgttctaattcatataacgcatactatatattaacaaaaactctcctactatctttcaattgctttcacaaaacattttttctacttttccacaaattataaattcacgaatactatggtctatggctgctcgcgctctatgtaacttttggagctagagcttaaatggtatggtgtaaaaatgcaatggtctaaaggccatgttttatataaaaaaataatttaatgtttggcgtcaaagggatgaaaccattatatatatacgctactaattagtaaattcattatgcacgaaagaaagtcaaacatgattgataagtagcttcttgttttggtaacgtattttttttggatttaccaaatatagaccaccatattcatgattccaagtcatcaaaaaatgactacaaaatcatgattccaagtcttttatttgggaatatctaatcatatacgtaatcgtaatgtactaatgtggattggaaatgttagtgcaaaaaagtcttgtgacacctgatgtaacaagtaccaaccgacgtcgtttaatttatccatcagaaacatcacaggtaagaagcaacccaaaaacatcgtcgtatttgccatcaaatgagtaaaggcaattatgtgggtctttaagattcaaccaactacacagcaatggaacggacgggttcgcacccaaagcccacccaaagcccaaagggtctcgagagagcttcaaggaaacactttgcaacgattacctaatttccaaagattacctgatacctttggtatgatcttttagtctctactgatgacctaattatcgagtagacatattatataattggttttgcaagagaatggcctagtttcgcagacttttacattctcggtaacaatcttatcaaccgatacatatatgtttgcattatgtttttaaacattatcgagtagacatattatatatcgcttatttcacaactatttgttactctacaactatcaatcatttcctgaaagagtagaacactgtgaagatataaacactgagagcagaagagaccaataccacaagcaccagcacggtatgaatcgccaaagcattgccgcaagagagaagccccagacggagttgtataacatcaacaattgacaacagaagaaatacacaacccaagatagatccaccagctgcaccaaccacaccgaaacgaagcacatctctgttgatattcgctttaaacacttcgtccgtttctttgctgttcaaaaggttgatggctagcttcatcccttgagccacaagggaggagaagagaaagaaggcaaatgagatgacttcaaacacaaccaggtcacgttccacgtctcgtcctgcactgcactctgttctgtccgtgagggtgaggtcacttggctggtcgaaggagattccgacaaagactgcaaccgtgaagagagaattagcacttacaatcccatcgagagccgtaacatgaacactcgtggttgaagtagttgaatggctggtgttgctattgctattttggttgctgctcgtctctatgtcggaatctgccattaccaatgaatggatctctctttctttcttttttgggatagctaaaagcttctttctaatggtggatcataatcttctgttgtgttcttatgattcccttttgaatatgatttggtaatgttgtttaagagtgggtggtgtttggtttagaacgattagccttttggaaaacgatagctctatgttaattgataatttaatctttttcaagtcttggaaggtacacacacctttctccttttgttatgaaagaaaatggtttcttctagtaaccaaaattttgaactttattcacatgtaaaacaacacaatcttgtagcaaatttacacgttaaatttaaaacggtgttgcgtatttgaagagacaatatcctaaacgttatcatattaatattatttttgttatttttccgtcaaacaccatttttattaagttatcgaaaagatactatccgttagagaaaactattaaggaaccgacgtgcttacatgagagaaaataacattttcagttttaacttttttggctaaaaggtctactcgagtgttaaatttttgagaaaaaaatctaatacgaaaaaaagaaaaataaacaataaaacaccgaaaaagaggcgaattccgctgcaaaagttggctaatctttttggttatccagaagagatatcaaatcggagcatagtactattattaactttgttttaacctaagcgatgtgggataaaaatcctcttaacaaagacaaacaatcaatgacgtcatcaatccaaaaattggcatgtcctcaagattaaaaagacagtcttagctgacgtggcctgttctcaagttttaattggctggagaattcaagaggatgaaacatagaaatcctctttgactaaaatattttaaaccacacaagagaaggaggaggcaatggcggtgttatccaccatctactccatcaccagagcttcaacgcctactatggcgtctctaactaatgactcaccgtctccacttccttcttcttcaccgtcgaagcttccctctcctacttctccgtcaaagaaaccgttaaaactaagacaagtgagcaaacaaatgggaagtcaaaaccagcaacgacgaggcaacaagccttcgatagcacagattgagagagcttttggctctggatcatatcgtgattccgaagggtaattaaagacactaattacattttcaaaatgtgtacttatatacagtatcgtatatgcgcggttttgatatttgtttttttttgtctcgtgaaagggaaatggatatgaatacggtattcgatgagcttctattaggccatgctaataaattcgaaagtaagatcgagaagaagctacgggagattggcgaaatctttgtagctcgaacagagcctaagcttcgttcctcgggttagtttagtgattataatctcatactaatcatattccatagttgcgttggcttagacacatctacttcattgatattgcagggaaaccagttttgatgtttacaattcaatggattcttccaatatggattatgtcactgctcgtagcttgtggagttatcaaactcccttttagcatccctttccttgatgacttgatcatgtgattcttctacacagttaatacacatgtactcttaccatatttcgttaataatacttttagtgtattagtgtaataccatacctcaaacaaactcatcacagataagtctctagggaaagaatgcttgttattggtgagatatacttttcagctcacggtgcactcgatatggaaggaacggaatggtcgtcgacatggagaagtacctattcatatctcccagttaactcgcgaactcgacaagcaaacccgaaacagaatcttttctattcgagagctaggtgatagaagatatgaagattctatggcaatctggtttggttcaaaataatctagacatcttcttaattcttgctcaaacacaagctgcacttgatgtaaaacagttttttttttccgaatgattttacataatattccaaaaaaaaagtaatataccataccttacctatataaaaatcagtggccaatttacgtagttagtgttaggtggccaaacaattctgaattctcactctcaacatctgtattttttttaatatctaaaagttcaaatctacattttctagaggcgagatccacacataaagattcctcccgacgggcgtcgaacctaatacttccacctctaaaatttatcattggaccaacacaaagttggttcaaaatctatattatccacaacattttaaaattctttgcttagtaaagtagagaagaaataatcgtcatctttatttaaaattgatgactgtagtataagcaattaagcatctcttgactacattattgaaatatactccctaatatacacatggctttgtgattttattatagaaaaaagtgctctataatagatgataatccagaggagcatattcgattctaattaggtccattactgtcagattttccagagatatatatcattaccgtttatgcttttgcgtgacctttaattatgaatcacattgagtaaaataaaacattattattatgaatccgatttctctttgatcaattattattcaaattctaccttgtctaaattattattattttcgttagtcaaataaaagtaattttataaacggacagatattaaagccatgaatgataatatagatcgcattcaaaaccgcaccgcaacagtactgtaacaatatcaaaaattatatatatatatatgtatttatgtatttttgttaatatttgaactgtaccgcatttctccaataccgcaaaacgcagtaaccattcgaattaaagcataaagacaattcaaatttggtattttcatatcatttttatttttgactcgttttatatacaattgttttttgtctgaacaaattgacttttaaatgaagaaaattaggagaaataaaatgaaacggaacgagtcatcatcataaacctcgcgtcccttttttttttttgcttccttcactttcttcttctctgtttctcgtgaattttcccgtgaattttcgcggagcttttctcgggaaaataatctaaagaagattcgagattaagacacgtcatctccggtttcgtagagagatctgaagaacgagtctcttctcttctccgatgggaacgctacagtcatggagaaaagcctatggagccctaaaagactccaccaaagtcggacttgtccgtgtcaacagcgaatacgccgtacgctctctttccgatttctttatctatttctttaatcttctgaagaaaatcttccgatagattcggtttttgatttgtggaattttcaattggaattttaggatttagatgttgccatagtcaaagctaccaatcatgttgagtgtcctcccaaagatcgccatctcagaagtgagtgattcagttaatttttctgggggaattcttagatctggttttattctgaatgaattcgtttcttctgttgttgtctcagaaatcttcgctgcaacatcagtgactcgtgctcgagcagatgttgcttattgtattcacgccctttcacggcgtttgcataaaaccaggaattggacggtacttattgattactactctctcttgtgtttcttgataacatggtccttagtattgtctcttgggttgcttcaacaggttgctttgaaaacactaattgtgatacatcggcttctaagggaaggagatccaactttcagagaggaactattgaatttttcgcagagagggcggattttgcaactttctaattttaaggatgattcaagtcctattggttagtctatttagtgtttctccttcatttgtgggtatatgtgttagaatcaaaagagttttctatagagagtgaatgttaaatgtatgttttgtttctcttacagcttgggattgttcagcttgggtacgtacttatgcattgtttcttgaggaacggcttgaatgcttcagggttttaaaatatgatactgaggccgaacgtcttccgaaatctaacccagggcaggataaggtatcatgttgttggtttgctcttttttcatttggtgttccttcctcttttttttttcttctgattgtttcggttttgtatattgtggatgactaggggtatagtagaaccagggatttagatggtgaagaactcttggagcagttgccagctttgcagcagcttctctatcgtctcatcggttgcagggtacttttcttatgttatttgtttttgatggtgattgtttgtggctccacttgctgattaatgaactgtcttttgcccttttgttttttttcagccggaaggtgccgctaaccacaatcatgttatacaatatgcacttgctctggtacgttacaaattatctttggtcctaggattaacatttccacaactggacacagtcggtgtcttgatctgcaaaagctttctgttccatctggaaaagtgaagcttgaaaatttctaaaatctaaacttctttgtcatcgtatgataggtgttgaaagagagttttaaagtctattgtgctattaatgatggaatcatcaatctcattgacaaggtaggtctagtttttatgtttggcatcatagctatcatatctctctatctgctttcctttttccctgcttaattattcatatgttgcagttctttgaaatggcaaaacatgaagccatcacttcccttgaaatatacaagcgtgcgggtcagcaggtgatatttcgttggactgtttcagttggtatatattttacttgtcgcacattttgtgtgtaacaagggataatgtgttttttaggctcgtagcctttctgatttctatgaagcctgcaaaggattggaacttgcaaggaattttcaatttcctgttctaagagaggtactaactgtggacaactttgataaattaatttggcaaccgttgcttgtttctgttacttgatgcatttctttacatttgtttacttcagcctccacaatcttttctgacaacaatggaggagtatattaaagaagcaccgcgtgttgtcgatgtcccagcggaaccactggtatgtatgcatatttctcatattagtgatccaatattttttggcttctttttttctgtgtcttatgtgctaatgaagttttctacattcagcttctaacatataggccggatgatggactgactaccgaagatactgaaccgtcgcatgaagaacgtgaaatgttaccttcagatgatgtcgttgttgtatctgaagaaacagaaccttctcccccgcctcctccttcagccaacgctcagaacttcattgataccgatgatctatgggtgaaaattttatatgatcactttatgactttgattttaattttgattcttcatgcgtttcttatgtctcaatttctctttgttcaattttccccacagggtctgaatactggtgctcctgatacatcagtgatcgaagaccaaaatgcacttgctttagccattgtttcaacagatggtgagcttcttgttggaccatttacatgtccactaatattctgcgagtttggagaatgtgttactttataattttttccctttgctgactcatttctgatctctgtgtttccagctgatcctccaactcctcattttggtcaaccaaataattacgatcctacaggatgggagcttgccttggtgacagcacctagcagcgatatctctgcatccactgagagaaaactggtaagcattattctctttgttatacataatgctatatgcttaaaaacagtagatcacagaaatcaacgccagttagtagttgccggctaataatttggctggaaatggaacttttcctgttcaatctttaaatctttgagactaggaaccttgttaatagaaaattggtgtgttcataatgaaagagtcatcacaagcattgttttaccgaaatttgttacattaagactaggaacctcgctattaatctagttatggaagttggaagtgtaaccgtgagaataggaagttcattgttgtctaggtgtttacattggaggatgttttgttaggctgtaaggtaatcttggaaaatcattgtttttgtgcttaaaaaatgtttaggctggagggttagatacgcttacacttagcagtctatacgatgatggagcctacatagcttcccaacgtcctgtctacggtgcaccagctcccaatccatttgcgtcccatgacccgtttgcatcgtccaatggcacagctcccccacctcagcagcaagcggtgaacaacccattcggtgcttaccagcagacatatcagcatcagccccagccaacgtatcagcatcagtccaaccctcccactaataatagtaatccatttggtgattttggggaattcccggttaacccggtttcacagcagccaaatacctccggttatggtgatttctcggtaaaccaacataacaacccgttccgtagcactggcctcatttgatcatgttgtctattcatgtttgtatcttcttcattgggttggttgagggaaatggttttatttgtgagtaatagaaccacatgattggtttgttgatgatctttgttgttattgcttgtagaaagattatatatatgggatatatataatgcatatatgagttaaatcccctaaacaacattcgtaaaattattgtttattctaaatgggcctgttgggcctttatctttcgtactttttaatgcttcaatcgatacgacgtgtctctcgttttaggttctcatttcctatcatccttttgcacccattgatatttcaacacgcgttgacatacaacacgcccgaatccatcgattaattggcccaaatagtttatcctttattctagggcttctgttgccaaagccgagggagtatggaggcgagttgttgaaccccgatgaataaccctttgatcttgagctttaaatatccattccataccgcaagagccagaagatgcattccaggccgcatctgtaaaacaggaaataacatcagtcggaggtaacaaattagaagcctcaacacgaggtaatagatgagaaaactcctcaacaaaaggtaagggaggtggtagtgcctcagaacgaggtaatgtagagagtctgggtacagggatagctttaactactaactgagcggacttccattccttagctgcagaaatagcctttaccaacgagtcagtttccgagatagatgtattctaaaaaaccagtagattcctagaaagagaagtgaagagggcttaaaatcaatttcttggaccgataatgaacctagagaatacagtgaaaacggaagttgacaaatacttgagaaacatgttagccaaaaggcattctagctacatatagtataacttcaataaattaataactttttaaatattttaataataacacagtttggcataataataataataataataataaatgttagacgagcatacaaatatagaagaaacaatctacacaatataattctcacttctagacttctagttctatctatatattctatctaatatagttaaataatagtcaaatctatctacaacagtacgtataattcatttacaaaccttgaactcttgataatattccaaagaagaatatatataaatagctttccaagttccaataaatatattttctcataaacagtagctaataacaccctttccatatgtacccaaaaaccggcatgtagtgaacaaaccagtgtgatcaatttggaaacagtgcaatctcgtgagtaaaagacagacgttttctttgttcttgtccggaaggacttgcgtgggcccatcaacagaaatttagatcacactcataaaaagtgtatatgaaatgagtatgaacacatcgatcatggtctatattggatatgtgatatgtcctactcgtttcacgggtcgagggagaagaagaaaaacacaacaaaacttataaccactccatgtgattgttgagacatatatatctactatatatattaaagggtctttatattaatatcatcgtgcagtttgattagtaaatcaaagatacaacatctctctgaaccctttaaacataagaaactcggatgatacaaaaacaaatgtaaaacatgatgaaatcgacacataactctaacttaaaccccacaatgtattaaattatataaagagacacttaaatcaaagttaaaactcctcatggtctcatggtctcatggtcatggagctccattgttggcgtaagtgttgacaagggcaagagcattactcgttagcctcttcacttcctcgagccgatcacaaacggtcgtcttaatcaatcctccttcgtccatatcttcaaatccatccgtacacgtgtcctcatccgtcaatgctgcactcatccacgtctgcacgttactcatctggaacctaaacgtttctaccgacctccgagctgccgtgccgcctcctctgccgttcatgtcgcgtagttgacggagagatcctctcatctcgtccaccgcgtcttcgacgttcgaaacgcagtctcggattacggcggaagctgtttggtggccatcaccggagtatttagcggcagagcgtgagagtttggagagaaaagccgcagtggatttggcttgtgaaagtgaaacgccgattgcgagcttggctagcctcgccggactgtcttgaacggcagaggcgtagccggagagtgacgtgaagcagacgtctggatatagagtagcgttgcagcttgttcggatgaaatctagatcgttggttgttgtagtgtttggtcgtggaagcaaacggacggctgagattgatccgaatatcaagagaaatgtggtgaagaagagaaacgtcgtcgtgtgactttggcttacggttaccattttcactattttcaaaatttcttctttgttctcttctttcgtaagatttttagaggagtgattggcggtttatgtaggccttatagggatgggtcgttctcatgttacatttttacccatccttattatttggatttgctagattgccactaatcattttgtctgatatgtgtgaaatcacggatattattttttcggttataatctttagtcaaaatagtaatagtaaaagagtaagacctatatagtttcacattacgatgagccatgtcgttatggaactacatacttttttgataggaggaaagtatatctttggttctatccttaagatatcatttcaaataaatacactagttcaaatgtatttttactatgactgcattttgcggtgcgattcaaatagtaacaaaaatacataaatacatatgtatatgtaaagattttgatactgttacagcactgttgcgatacgattttgggtgcgccgtatatcaccattcgtatccataatgtatctaaagatggagaaaaagaaacattaagactaaaccagctactattgtcgaacaatcttgcgaacaaattaactacaaccaattaaaaatcaaagttgatattgcatcacatggtcaatagtatatattatacaaaacaatgaatgtttatataattaacttcgaaattttataattgcgtaatagatgtttaaactagatggtggatataaacttgtaataagatgacaccaaaaaccttaatattctaatgggagccacaaaacttgggagattccatggagattcgcctaccttctttattttgcgattgtggggatggtgttttcatctgtcgtaccaaagtaattaatacgttagtgtaatgttcggtcacgcaatacttaaaaaccattcatctccaataatttcaacgttcaatcaaattagtgcgtacatatgatgtgaaggttcaaatattgtaatctaataccaatgaatgtttacgtgactatatcgcattaaatttttttttttttttttttttttaaattcaggaggttctggccgaagcccgtaatccccccatgcccgaaaccacagtatgtaatattagttttgtcccaaacgtcactcgaaccggtgacttctaagtttcgcctaaggtctttaccaattaagctaacgacacttggtatcgcattaatttattgataacaagcaaatcacttatatcgtatatgaaaccttatgatcaacaaattataaaccttttgtatactgttggacattttgttagaagattatcaatttggaattaacttcttatggtattggaccaaccatgtttttaaggagacgtaggaaactccgcattatggtatttctctctaaagcaaatactttagggttatgatgacttatatgtatagtggggaggtagccgactcattgttattgcgtaagacgtagtgtatatacacacgcatactcgttatatatagactaattttccttttatccacggttaaatatattttccaattgatgtatataaatatttttagtttggtcttttgaagaatgttggttacgaattgtgatggagatggaggtaacgacttctgttgccttcttttagaagacggtccttaacattatctgtgactatgaggagggtccatattggtttagtcaacttttcaagaaccaaaataaaatcaaatacataatcatgattttaattgattacggacttttaactttgtaggaattc

SEQ ID NO: 149 - DNA, 89138 bp, Arabidopsis thaliana
aagcttaggttacttgatgtgtctaacaacgatttttatggaataccgccaaagtttcgggatactgtgactttggtgactgaagggaacgctaacatggggaagaatggacctaacaaaacgagtgatgctcctggagcttcaccaggaagtaaaccttcaggaggaagtgatggcagtgaaacttctaagaaatcaagcaatgtcaagattattgttcctgtggttggtggggttgttggtgcattgtgtttggttgggcttggtgtgtgtctttatgcgaagaaaaggaagcgacctgctagagttcaaagtccaagcagcaacatggttattcatccgcatcattcgggtgacaacgatgacattaaactcactgttgcagcttctagtcttaacagtggtggaggaagtgatagctacagtcacagcggaagtgcagcgagtgatattcacgttgttgaagctgggaacttggttatatcgatacaggtcttgaggaatgtgacgaataacttcagcgaagagaatattctcgggagaggtggtttcgggacagtttacaaaggcgaactccacgatggaacaaaaatagctgtgaagagaatggagtcttcggttgtgagtgataagggacttactgagtttaaatctgagatcactgttctgactaaaatgcgtcatcgtcatctcgttgcgcttctcggttactgccttgacgggaacgagaggcttcttgtctacgagtacatgccacaggggacactaagtcagcatttgttccactggaaagaggaagggcgaaaaccgttagactggactagacggctggcgattgcattggatgtagctcgaggtgtcgagtatctgcacacacttgcgcatcagagctttatccatagggatctaaagccatcaaacatccttcttggtgatgatatgcgcgctaaagtctctgactttgggttagtacgtttagcccctgatggcaaatactccattgagactcgagtagctgggactttcggataccttgccccagaatacgcaggtttgtacttacccaaattttaaagtctctgcctttcaattgatttgcacttgcccagtgtcaaagtttcatactttggccgttttgcacttaaattttcatgctttgatcttattgcattttcctaaatgttatagtttcatcctttgatcgtttggcaattgttctatactctgattttggcagtgacgggaagagtgacgaccaaggtagacattttcagccttggggtcatacttatggagctaatcactggtcgtaaagccctagacgagacgcaacccgaagacagcgtccatctagtcacatggttccgtcgggtagcagccagcaaagacgaaaatgccttcaaaaacgcaatagacccaaacatcagcctcgacgacgataccgtagccagtattgaaaaagtctgggagcttgctggtcattgctgtgcccgtgagccttaccaaagacctgacatggctcacatcgttaacgtcctttcttcactcaccgtccaatggaaaccaactgagaccgaccctgatgacgtctatgggatagactacgatatgccgcttccgcaggtgcttaagaaatggcaagctttcgagggactaagccagaccgcggatgactcgggatcttcgtcttcggcttatggaagcaaagacaatacgcagacaagtatcccaactcgcccatctggatttgctgactcgttcacttctgtggatggacgttgaaaaaatcaagattgcgtaaaacgttttagtagaagaagaagatgaagcattgtgtgataaatctctctctcgctctccctttttttgcttttctctgaagcatatttacttatgacttcgtttttatctactgcaagcttttggttagtgtatttatctatctactttgtgtagtttttatgcaaagataacaatctttgagttcttaaaattttaatatttcgtcagtaaaatccaactcataaaccgtaaaagctgaaccaaacagtattttgaactcactgcggtttaagttattaacatgtgtttaggggtttaagcaagtagattactataagtacactttctatgagaaatcattttgtattccaagcccacaagtccaataaagccatgtgtttatgggtttggactttggaccatacacccactggaatatcaaagcagtctccgtattcattcaatttgctatgagccagttggtccttcccttctaatgaaatacatgattttggtgtccctcattttataaagcacactgtccaatccaatcttcataatattaagcatctactatttaggttcactgatcatatgatataaaatctaaacatcaaaggtgacaccaataattggaactaagttaggcaaacttaaccgtttacatgtaaggaaccaattatcacttataaaccattcacagcttttgatgtagttaaaaaagattagatatgagctccaatataatgcagattcaacaacaaaaacaatactagagttatatactcatatgtcactaattattttagatatatattgataagtttgtataattattaacttataatattgatgtgatcatacatttaatacataattttaaaaatatatattattttattatcttatggatttgtattcaatattacactagattaattcaagaacaaaaaataaagttagggttaagacatcattgagtcaccatgccaagtggtatgttcatttttgttgtatttcttctaatctttcatccagtgctactatcagcatagatcaacaacgttgagacgaaaaatctgtattaaaacgtgcaagataaattgaacaaacacatattatttccacgttttaataatcatcgcaagtttttgcaaatggtatgtattcaactaaatcatatttctaaaacgtaaaaacgtgaaaacccgcatacgtattatctcgaatagggaaaactttctgtcatatgttgtatcgaagatggaatgccatagaaacatctacctaaacttataatttcaattttatataatctataaatgctactatgctcattatcaaaatactttactattactttctggttttaatattcatcttaacgattttcaagtgatatactttttttttaatttataaattatgagcaaatgataagatattttttaggatactttcaactaaatctgtaacaaatttcaccaatctatttaaatttcaattgtctatgtatgcgaacatcaagcaataatctagtctctccataagtatagtatgtatgtgctggatttgaatttgcctaagatattattatgtgcactttggaacggttatttttgacatcaaatattcctatctatgtatatgtagaaaatgatataattctaaatttgataagttgtttccttggaaatttcggagtaaatataggaagctttgcttacctttatcgcaccatctaaattataaagacttaactttttgcccctcaaagtcaaattatgtccactcatttttaattattacaatttgcatattaatgacctaattagtggatttcattcgtattaaaaacatacttatcgatttatctagagacaaaacagtaatttaaaagttacacatgcttcatattcccgcctggtatccattttaggtattaaagagtcacagttattgttgactctgtggacttttgatttttccctcatttttaatattaattgtcatttagtttccttttttttaatttattattctccacaaaacacaatatgtaattaattgaaacattcctaatatcatttctttaatatttcgtttgccttcttctactatttttattcacactacaaatcaaatcacatctctcttcttctttttgcttttggccttcttcttcttcttcttctcctccaagaacactaaaatatttttggatgattttgatcggagaaatataaaatcttctcatctgatctatcaaaggaactcagtttctcataccaaaatgaatctggtacatgctcattttttcttattaatttctgcagtgttagtttttgttgttgttgttgttgaaaacaaatcccttcaattcaagttcatagtttcaatataaattagaaacaagaaaatttctgcaaaatttatagttatgatttcttcatatagcccatttataaattctttataaatttcaataaaaagtaaaatttctgcagattccatatccttcaaaaatgtagttttattttttttttcttttcctaattgtaaactgatctctctaattcaagttttaaatttcttcatataaaaaaaataaagtcaataaagtttcaaatttgtacagattgtttttttccggataatattcatgtttttttcttcttcatagtaattcattataaatcataattaagtttatgcaaatctaaaaaagtaatagcaataatttttgtagagtgagaagagaagaagtgaagaagtttggattgaaacactactgaactcagagttctttgggatatgtatgaatcataagtatcttagaaagaacgagaagaatgtgttttgcattgattgtaatgtggaaatatgcagacattgttgtaacacagttacagattctcatttcctccatcgtcgtcttcagatctgcaaatacgtttaccaagatgttattcgtctcctcgaaatccaaaactacttcgactgttccgagattcaggttttttttttctttaaatatctaaatcattcaataattaataaaataatcatttgaattcttgttttagagttccaaattaatgtttttaattttggtattggttggcaataatttatgtatgggggaaaaagacatataaaataaatggagagaaggcaatacatttgaattcaaggccacaagcaaaagatgcaagaccttcaacaaaagccaagaatggtgcttcatgtgtgacttgtaaaagatatattcaggatcatcctaatcttttttgctctatctcctgcaaggtaatttatggtatcttttgttaaagtttatatttccctttgaattgtgttgattagtctattggtagtcatctacctttcttaatcttttatttattggtagttatcaaacatataaaacaatcatttacagaataatcttgaaatgataaaaaaaagttagtcttgaggcatatagttttgacatagtatataggaaaattatgagtgatttgaattgtacacattttcaactgtacattgtcttgttcacactcaaaaatgtgtatagttttgttttcggttagaagatgcgcaaatattttttaaaagtgtttcattttaatacttttcttaaaaatcattgttttgaaattacaatatataatttcgaaaaacgtaatctacattaacaagtatcatttaatacaaattgaaatcacttaatacatgtgagttgtataaacacgctttaaaacgttaaatttgcgtatattgtttgaagtcaaatataagaatttgcttttgagtttagagcatgctctctaatagttgaaagacattttttttaatatattttctttttgtagatttcaactccttcaaaaaagcataaattttgtttttctccaaaactagaacagagtgttttggagaaagaacactctactcaagaaggaagcttagaagaaaaaaaatcgtgcacatcgtccctcactgatgtttcagaagattctgaagttttattgagtgatttttcatttagaccactcttgagaatactcaagagaaaaggaatttctcgaagatctcctttctattgatttttttttttctttggatttgtcatcaaagccatacattatgtgtattttatctatgaaaaagatattatatcggctatcaatattattttaacaagttaataagttttgatgagaaatagtgatgttttatttttttgctaataggctaaaaaaatagtgatacaaagaaaaataataatagtgatgtgtaatgcgtatgtatgagtgatttatttattattcatcatggagaaaagagagagagatatgggcccaaaaagtttttttggttcatgagaatgagattgtgttgattcactggaacccacagttttaatgaaatacaatatataaaaatgaatattatgcaatattcttaacgctttttgggatgaattgatagatacacgttgtaatgacaaatgatggtatcattcgtcgtagactgaggttccgaatgcaggccgaacggtatgatgtggtgcggttcgaacagtaacaaaaatatatatatatatatgtaaatatttttgttattattagaaccgcactgcattttatccacagttaaaccgcacgttaccattcggagccaagtcataatttttctacgatattatcatttgtaaaaattacatggtttggtaaacttctccatatttcaattcctattcctgtatttttgcaacattctctttttggtttataataaaaatgaaaaattatacgattcaacactccatttaagttattcgggctaacgagtttaccattttatgtagtagtttttcttcttctttaaattaacgacttttcaatatgtcaatatgcattgttacaaattggagcaatggcccgtagttgttatcgtgactttttgggtgtttagcaaatgtgtcattttccgtaaaaaaagaataaagtatcaagtatatgagaaaattccatgatcattggtgtatatcacaaagactaaatataaatcattctttaacagaagtatacgaagatatagcgtacattttaacaaatgaatgaatgatcatgataatgggtctatggcaacttgttttacatatttttcatatcaaacaactttattttttcttttaaatagtattacctatcattatcatttcttctatttattgtagatctttgaatatactaatgttaatatttcataactaaagagatagaaccgagattgacaaacagaaaaatgaagcacggaagcatcacgattcacgattatgatacataatatagatttaattattatttttttgtgaaagaatataagtttaacttgatatttatgctataatttataaaatatctgaaattgaggacaccataaaagttttttatgttacttgtaaataccaccataaaaaaatattatcacacctaacaagtatctaagtatatacaaatttgtttatttaattacaaagctgaaaataggactgggcaaaaaatccggaaccgagaacccgaaccgaaatcgatctgaaaaattagattcgaaaccgaaccccaatccaaaaatttaccttattggatcctaaattcctctacccaaaaaaccgaatccaaacccgacccgaatccaaaaatacccgaaaatctaaattttacccgaaacccgaaattttacccgaaaatccgggtatttacctgaaaaatctgggtatttatccaaaaattcgggtattggttccaatttaggcccaaaaatctatatccgaaccgactcgaatccgattagatccgaatcgaaaccaaaccgatattttagatttatcttattagattctaaatttttctacccaaaatactcgtacccgatcgggttttacccgaatccaacccgcttacccgaatgcccgcccctagctgaaaactctaataaaaagatgaacatatacttgcttttaatattatgtaatacataaatttttatttaaagatattttgatgagaaattttcttaattgtgttagttagaaagaataaaacattttagaaaacaagaaaaataaatattgaccacctggggctcactagtcaacatggagcgtttattggggccagagacctttgtcgcgtatctttgtcttgaacaaaaatgaaattaaacaaaaccaaaacaataccataatcatctttaaaaccaactcaacaacaaaaaaaaaaatctttaatcatatagcatcctcgtcttatggctggatcactgttcttgataattattgagtcgcattatcaagccaaaaaaaatcaataatagataaagaagaatgatggtcataatgttttggcagcaaaatccactttagaaaattagaatatcaaatagaagtaaaagtaatgcaggaaaaaaaaactattaattgggtatgattatggcagacaaaaagttaagaataaaagaggaatgctgtgagccaattggaggatatatatcacagatttaactgaaggagacgagagaataataataatgcatgtgcttttcaatctcaatgttatgcatgttccacatgccatgtataacaacatctctcttcattgacaaataaaactcttcaaatcttccaatgtttcttctaagcttccaattcagcaaccacctcttagttcgtgccaatcacgtgttgagttctccactacatctccatgtcctcaaagcgaatgtgttaactctcgcatcttcacaactaactagtatatatgacttgaatatgctgaaaatcaaacctatggtaaacaggcttcatcatgtatgatgtcagtatataaaattcatgaaatcaattggtgtagttggtattggttcaattggtgtaggtgagctcctgggtgctatggcaaggtttcctgaatgttgaatagaggcgacacatagatctaagtgttttttttgcgttagttttcggagaagtcttacacttctatctttgaggttttgtggacgggcctcagatagttagcttcgtggcaacaacgatgaggattccaagtttcggttttatggcaatcacacaaatgtccgggtttcacgaattcggaatcggtgtttcactttgcgacttggccatttttcactatgtttcgatccgaatctttttgagtagtaatattgtcttaaattttctgtagtgcttttatccgtttctacttttctttgtaacttctgtcacaaatcaaaaatggtataaaatttcactttttaccaaaaataaataaaaattcatgaaatcaaaataagaaaactagtaagattgatttatatatactgaaaaaaatcaagaaaaaataaattttaagaaagatcaagtatatatgaacatatatacacatatttgatgatgtttttttttttcaaaatgtaatttaaataaagagttgttttcaatgtttggagcataataattggagaaaaatgtgcggattgtatttacataaacatatatttatgcagataaaattttatgccaaaaaagtcttaattataaaattagatctatggctatggttggtaagttttgaccataataatgggtgatatataatctcctgcaacacaagctgactttttgcgcaagctagggctagcgaatgctgaggttgcgtttcttggatctcaagctatctccataacacatgttacagagaaacacggagggcacagcttcatcgtcttcgatggaattgcaaagtgtgtggtgccaaaccttgcaagcatcacaagccaccattctctcaccatcatcatctctagctccgcatttgcagtcaacggtccagtcatcaaatccgccttcataccttaactctgtgcctatgtccagaccaaaccctttcaccataaactctgtattcccttgtgattttagactcacgttgtcgtctagcttctcgagatacctgtttcttatctccaacacttcaaatgtctctgttatgcagtaagtgtccctcagaactttctctgctgcagatttcagttctctgatggttgcgttttccggaacagccacgaggtcaccagggggtaataaccgagtgaagtctctgagtagttcttcatgattgggaagaacctggcagctaactgttaaatgattttgttcctggtaagaccattcttttacaaagctcttgcacttcaagataacctgagacgcttcactgtataagtctgaatcaggataagttaacaagagattctgatatagatagagaatatcatcgtacggactcagtccaggagtggtagatgtgcattcactggtttcctgcggcttcactttccttttctttttccgtttttgctcttgaacacgggaattgattgtccggagggagaactgtaacatcctgcttttcgggtttgtggacctctgcactatctggtcacctattagaactttgtcaatgtgtttgagcaagaaatcaatcaatcccgtatcaccaatgctacttctaacagcctcccgaaggtcttggcgactaatggtgctatttcgctctttaaacactttgagaaccgcttgggctgcatcattcaacctccttccaggccatctagaatgttctctcctgctcaaatcatcaaatgagtaatactgaggaggttttatgcccgatgttgtagtattatgatcatcaaggacagtgtctctgccagattcatatccattatcatctgattcctgatcaggggatgtgcagacctcactgttctcatcagctctaagagtaggatatgaaacatgatctaaagacattgctactagtgccattgcagtctttctctcaatgggagcttttgatatgaaaccaagcatgaaccgaagcaaatcagagagagtggccaaagggctttcagtggatcctctgtagaaatcgatgatcttcttcatcactctccctttacttgttccagataattcttccaatatcttgtcaacttctattgagctaagagtgagaatagctcgccaatacagatcttttttgaccccaaagcttccatgagaaaacatataatcccatttcccaaaccatggtcgaccatatgcaacaccatggagcagcctcagatccatcgctcccttcttcgatgtatcatccaaagatatcttcctgcagccaaaatacataatcattgattaacaactccataaacactaatcaacaactcacttaacattatccactttggtttataattggttttgtccatttttaaaacatcttcaaatctttactaagattagcaaaaagatatctaacatgaatgtcacaatctctcctcctataagtagtaaagcaaacaactttttaagtaatcaatgtagctagagaacaaagagtggtacctagtgtggagagtagagcaaagacggtcccaaaagtccatgatttggtcaccagagaggtgattaggatcatcaagatcagtgttgatacaaagcaaatgaccaaaaccattgcaatgaatcaaaccatgcatcaaatgtgaagaaagcgtcaagctttctctcttcaatggctcattccattcatcacggtttgggattatcatatgatacttcctcttcgttacatagtgatgaccccaacctatatatatacacacacgtaaacgatccaaaatcgaaactttaccaagaacaacgaaaaaacaaaacctaagatttattatttaccaaagcatcgacagaaatcgcagagagggtttggagaagaatcagagatttgttgttcgatgatgtaaagagggaaaacgacgccatttgcttggcttccaaggaaaatagtagagacggtggctccgtcgatggtgtaatcttcaatctcggcatattcacggaggaacgatctgatgttgtcgcggaaagttgcggcgaggttgaagaaaggtggtgatgatgaagaagaagagatggcaaaatcgttaataaggaggactttgggggctttttgtctctccgtgagagcgtcgtatgcggttatcgccatgactgaaaaaggactacgggaaaagagagagagagagaggattggttttatcattgggatcacgtgacaggatctacttgtgaattgacggttttgcccttgtggcggcgatcgtgttttttggtttgttgttgttaaaagtaagagtggaatttccggtttacttggttttggtttgggataacgtgagattggcctgatttgattgtgacgggactcatcttcttccgtgtggtttgtttattaacgatttttgccctttcggcggcgattttggttcattggttttgttattttattgcaagagtgggagttccggttaaagagggtttggttcggtttaatttggtttgtgaccacgtgacattggctgattgttgcgacatgtctttcgtgtgggtttgcgtggattgacgattttgctcaatgtgatttctgaatatgtgttcgtgttggccatatggtgtattcatgaaaataactttatagaaggttaaatagtattagatttaggatatatgtcaatcttctgtttctctatatttactccgatacgttgttatctcctatgaggcaactgctgttgtataaatacctctcaaattctcaaattctactccgatactaaaaacttgaatagtaatcgttttcgtatatgggagtaacaaatcaagggaaaccaaagagaagctaatgttggataatggagaaaatcaaatcattatcttctgttctgtctgctcacataaagataaacaatgtgaaatctatttcgttgtccgcgcataatatcgggaaggtttagaatgttatatcattagtaaattcccaatgttcacacagttacaaaatagttacagtttgctaaatgtcatcttcatctccatcttccctttagtttaactaataagaatacaaaaaaaataaaaaaattataagaaacaaatgtgatgttttaaaatttgattaagcttttaagtacttccaaaatttatcaactaatttggtttttgatgttttcacctctggaacaagataactaggtaagtaaaacttttaaagattaaagtaaaatatatatatatatatatatatattatcacttttgatatgtaattaaattaaataaataaaaaaatctaagcaaaacataatcaaaatttaagcaaatgataatgaaatacgtgtaaaagtacaaattgtggattttgagtcattttaaccgcgggggtcactactttgtatgccaaatttgagctatatatagaatatgtccatatatatatatggtttatctacccttttttttgtgcaaatatggtctatctacaaaaagttcttgaacggactaacctctatagtaaaaagtcgacatcatactaagcattttattaaaaatcgtagctgtatgtttacctaactcaaaaggatcaacttgaaagggcttttgagcagtccgatgggtaatccactttggtaattaacttcatttctcactttacaagtttacagagtagtttgttcatcccacgcatgcaaaacatcactgatttgctatttttcggtatatatatatatataaaaaggcatttcgtgtgagtattgataatatgagtttagtagattagtctaataatcgtataaaagttattcttcaatccatcacaatgctaattattcaaaacatattcgtatcataaagaagttacacgaaaaggcttgttgagctgtattagaagacccttaacaggcctccatatcacactaagatgggctgaaattcactagtcttaaatggatccatatgagataccattaacatataagaatcatgaccaatttattagtcttaactgtaactaattgcctcatacactaattaaaagttgaaagtagtctattatatataaacctgaactaattggctcattaactactaactaaccaataaaatcagcaaaccggaacttaaagaggggtccgtaccgggacgtgtgagtcacgaagaagacggtgtaaaggagaacgaaagttccgatgatttcagcaccgtggaaaaggattgagacagagaaaaggcatgtatgtcgtggagaagatcaagagaatatttagttttcattattgcattttattagttttgtcatatttccatattcatatttatgcctagggttttgcttgtgtaatatcaaggtcctttcctatttacaggaggccttagaaataagtctcatatcctctaaacttatttttacttcaaaaccctacttcttcaagctatgtccggaagaaacgagtctcaatgcgtctttgtgaagactagtattgacactcgtctggcgctcctccttgatagtgatgatagtgtatatgctttcaaaggtaactcttcataatctcttccttttttttaccttggtaactttttgtagtaactaaactctaaaactcatgtttattgttgtttgtctattttacagagaaaatctgcaaagagcatgaacaatgtttcccaagtgttggcaacatcactatttctgccttgaaggtaacaacactttctctaacaacacgtttttgtttaccaaacaacaccagcaacaacttaaggaaggagtacttgtttttggtttgtaggttaacttgggtggtaatgattatcacttgtcagattgtacgattttaaaaaccgctcttcaaggcctccgtaacaaggactggtttctatcagtcgacctagtacgtgtcgaggagaaaggtgagctgcagattggtgaagttgttgagaagaaagcaagaaagagaaaatcgaaaagtgacaacaaaagtataaagaaaccctccatagagactccaacagaagcaaaaggtaacctctgttattgaatagtctatatcatgttattgaagagtatcagtttatttaccgttgtgttgttatatctgtttttcttaaggccttgaaagtggtgagggaaatgtcactaagatgggagagaatcagcatatttgtgatgcagatcaagagggacctgtcaatggtcataccattgatgttgaggtcaagcttgatcctgtcgatggtcataccattgatgttgaggccaagcttgatctttcagggacaatggaacaaggtaaaatagtttataacaattgtagagtgttgtgttcgtttattagatggtatagtatgtatgatttatgtgttcaatagacgaccttcaaaaggaggtaacaaatgctgatttagtcatgagtgaccaagacaaggatcttgaaaagggtaaacttttgttctttttattttttgttatattagtagaagtttctgattcttatttctagaatctagatgttacttgtgtacacactagtaagccttgattagctttaagtgttgtagataatcttctagctgaattacaccaaactactgatgatgctgagaaagaagagatcataggtcttgttaatgctactccggaagctattgagaacggtaacttcagttcttggttgtatatacatactttttcttctgtggcataataggcaatggatcatttccattgagtcgtaattgctgaattttgtgtagaaactgagatgagtgccaaggaaaaagatggtgatgaggaggctaaatctgagaagcctaaaaagaaaaaaagagcaaagaaagtcaagactccgactaaagaagatggtctagttgcttctagctcaaggaacgctgaggaagatggtgtcgcgagagatccgtaggagaatgaggataaagttgtgaagaagccgagcaagagatccaaggaggagcagtctttgaacgttgtggaggaggatgcttaagtattgtctcctatcacttaacaggatcattcatcgcttctcttttgaacttttggtttttgtcttttgaacatttgatgctttatgttttttccggtttaagcaatttatttcctcttttatcatatctgttattagctttagagagagtgtgtgtgtctctacttggactgcgtattccatgtacttcactgcagggaagttagaccgtgctaacttctgaagcagctccactattttgtctctgctctttatcctagaaaaggccattagatgtaagaaaaacattccacaatagaatgtgttctgtttctgctgctgctttaaaaaaaagtcaactgtttcagataccaattgtctgcgtttatatgtgaaaacaaacaatcgaggcctaaagattacatttgaaccataggagagaaatgatatcttccacgccatatccttgttcactgatggaaggtacaccaccatatcatggctctacacataggtacaccaccatagctttgtatcgctgcaatttctatactcatgtctctcttgtcattctcatatacccgtttaaattataaatgtaaaaaaataaaataacatccatcaattcttcattgtaccttcaactgcaatttctagtattttgacgaggcatgcaaaatcatttttctctctgaatattagtagtcaaatccaccatagctttgtatcgctgcaatttctagtattcttaaaactcatctataatccacatcacttgttctcgggaacatcttttttccactccttttaaatttacttatgagaaagtttaattttcgtcttgcaataactattacaaaaaaattcttgacaaaaaaaccccaattattattattttttattttttaaaatattataaaatcaaccctatgagctatagtatgacttacgaggagtcgaaacgattcgcattcctctcgtctacacacatgcatgcctttaaaagctgtggctccaaaatatttagttcattgtctatctgtcttactctttcatttccttgactgttcgttcctcttggtaacatgtgaaataaataactgttttttttacaatgttgttccatagtgtagtcttagttctatattttggttttgtttctcgatatggttgtttgagttaaaaaattgtgtgtttataggagtcattatcatcaagaacaatggggaatcatcaagctgttaagaagttgtgggtgattaacaatttctcttttttggattccgatagagtttattctgatatattcgtggtcggtggctgcaaatggtaagaacatttcttgtttgcaagtgatatatatttgtgttcgatagctacaagcaaatgagtttctgtggtttttgcttgtaggtgtctactcgcccttcccgagggaaacaataactatatctatgattatttctctctgtatctatgtgttcctgattctgagtatttgccttccggatggagaagacgcgctaaagtttctttcactatggtaaatcaagttacgggagaactctcccaacaacaaggtgattgtttctactactctctccactttgttggagtatagctcttgtcatgctttcaagtttgttttgtggttttgtttttcagaaggagtatactggtttgatgaaaagaacacaacccagggttttggatctatgtttcgccttttggtgtttcaaagcagttataaagggtttcttgtaaacggagaagtcgatattgttgcagaagtagatgttgttgaagttattggtaaattagatgtatcagaggaatcagaaagcattgatagcaatgggtttgacgtccttgcttcacaagtaagagaaatacttctatatacatagaaaacaaacaatgaaacgaaattgtaacagtttctcactagagtacaatatatagatggaggctgcatgtattttgttggtttattttcaggtcttcaaaaaccgctgttcgatatggttttcacttgaactgtctgttttgtttctttgtaggtagaatctgtgaacagtctgtttggaaagtacccatgttttgcatcaaaactctgtcccaagaccccacgtttaaagaaaaatgttgtacaaagtctgaatgagattctgtgcaagtctactaaggaactctctaatggtgatctggccgaggcatattctgcactacgatttgttacgaaagcagggtttaagttggattggttggagaagaaactgaaagagactggtaagagtcgattgcaagaaattgaggaagatttaaaggacttgaaggtgaagtgtgcagacatggatgctctgcttgagttcttgcgctgatgtttcttgtgacagagtttggatctaatttgtgttttggtctgtttgtttttgtcttcgttttgaaacagagtcttttcaatcctgtggaaaatcaagagaacttgttgaggtttttgctgtgttttatttttatgtattgcattttgtttcttgatgaacaagtaatcagaaatgtagcattttaccttcaaacttggatccagtattaagagtgtctaatcatttttttaagatgccaaagtaattcccaaatagaggaaatattgtttatatttttctcattaaggcttaaataactgttggtaaaataaaccataaaaaatggaccgaccactttgtatatttgtttcctttgatccaaagccaattccatgtgacatcacattccaatgaaattaatgtgaatcctcccacaacttgatggatcattttcttataactttaatccttccatgtcacaattctttgtctggttccatatcaaaagatatggcattgtttgttaggtgataatcttgaatgtgagcgatggcagaaggtcagccaagagaatttggatcttatcaaagataaagtgatgctggaaagtaagatgcaacatattgaggaaaaactagcttttgaggaagaagaatcaaagaggttgaaaattaagctcgcagcaactcaagagtgtttttgtgctttgcagaatgtggatcctgatgttgttactatcaagagactacatgctgaacttgtggcagaaaacgaaaaatctaaacggttagaaagaaaaagcggacaaaggaaaatgcaatcgttaggcctagaatggttaaacgaacaatatgcatgtcttgaccgagtaaaagatcgatctcaatctaagggacaaagacgatgaatctgatacaagggttggttggaattaaacccagggtagaaaaactttcattgtgtaataagaaagagattatagaattaagtctcgtaaaagcatttatatgttgaatcgcgaaaaatatagaggtttggcaggaaataagtacgaatgtgcgtccatggtcccagataccgagacgttcgggactgggatctcacaagttttaataaaaatggatcaattgaatacttctgtatatagaaactgaagatgacatttacaaaacttttaactattttttttattcgtgtgaacaatgagaatttgctgataaatattcttcttatatatttttagaacattggccggggcttgaaaacaagtaatgtcttgcttgataaagacatgaccccaaaaatatcggatttaggcttggctaggctcatttgagaggatgatataaaagccaacaaaagaaagagggatgaaacttagtaagtaagtattcacgttagaaacaacaacgatcatttagttttaaaaccagtctcttgattttcattgtacctatgcagcggttacatggcaccggtacgtggatgcaatgatagggacattaagttttcccctaaatttgttgtctatgccttgagagtctcgctctttgaaactgtaagcggcaagaagggcataggattgtatgactcgagcaaagcctctcactggttaggtgaggtacatttttgtatttcacccttgaaacaaatgagaaaccttaaaaacccggccttatactacataagtaggtgaggaggtagtctagtgaaccctttaattctttcggaaccttcaagttttccaacaataatcttgtccttgatgatcaagctggtatccgtgtttggggcacaaattttatgggagttgttggctcatcgttggttaaagagtttcttgatgatggaaactttgttatcaagaacacatgggacaacgacacagctggtttcttatggcaaagctttgatttcctgactgatactttactgccaggtatggcattgggttggaaatttcacaggggaatcaatcgatacttggtggcatagaggttagtcacttgtacgttcaagaactttttgtagatatagaccatatttgcacaaaaaaaactagatagaccatatatatattatgacatattctatatatagtgcaaatttggtatacaaagtagtgacttccgcggtgaaactgactaaacatctacaatttgtacttttacattgttcattatcatttgcttagattttttttttgttttgccatttaatttaattacatatcaaaagtaataatattttggtcgtgaacaagcctcaaagtaataattacacttgttcattatcatttgcttctattcatatccgttatcatctaattcctgatcaggggatgtgcagacctcagtgttctcatcagctctaagaatattaaatgaaacatgatctaaagacattgctacaaagcctacaagtgccattgcattctttttctgaatgggagcttttgatatgaaaccaagcatgaaccgaagcaaatcagagagagtttgggactacgtgacattggctgatttgttgcaacacgtctttcgtgtggtgtgtgctcatttaccggcgatcttgatttttttttttttcctttggttaaggggagagtgggaatttccgtattatgtggtttcggttcggttctatttggtttgatgcagttgttctattcattttctagttatttcaactcggtcgtttgatttgttgttctgtaatttgtgtaagtatgtaatgtactcatttaaaaaaaaaactgcttgctgacggaaacttcgctatcaagaacacaggggataacgacacagcgaggtttcttatggcaaagcttccatttcccgacggatacttacttccaaaaatggcattgggttggaattttcattggggcgtcaatcaatatttggtggcgtgggaaacccctgataatccgtccaaatcgagttacacgctaaacctcgaacctaaaagatgaggagaggaatatgttgcctcaagcttccctgagcttttcgtttctaactatgagggccgactgtacgggactggttcttctattaacctctttctgaataccaccaaaatgtatgaagatcttctagtaccaccaggccccttggatgaccaaaaagaacagagtctaatggataaaacttttctaagtgataaaatttacatagctgacatacaagaggtcagtttcacggcttacaacgacagcatcttcacaagattgaacctaagccctcccggaattttacagcgcttgacatggaaccagacagtagagagatggattggttcttggcaccagtaataatatttatccaaaactaactaatagaaacccaataatgtgttttcaaaaaaaaaaaaaaaccaattatgtatccaaaaagtgtccaacgcatttaatttaattacatatcaaaagtaataatattttttactttaatcttaaaaaattccttatcttattccaagaatgaaaacatcaacaaccaaattagttgatagtttttggaagtacttatatcaaattataaaacatcagattagtttcttaattatatttttggttttgtattttaattagctaaactaaagtttttaaatggatcaatctaatacttaattatatagaaaatgaagatgacatttacccaactgtaactattttgtaaccgtgtgaacattgggaatttgctgatgatataacattctcgttatatgttatgtgtcaaatgagactttgaatgtttctaataatctgataaatggtcacagaagttaaagatgaaaaacatgaaagtgtgtgaattggagcgttgcatatggcttcatgtaaattagcttttttctcatgcgttattcttttgcagactcatataagatttgttgctttctcatataactttcttttatattttcagaaaatttatcgtgtccacgtagaaaatgcatacatatggccagcttcatgccgtgggcaaagcatgtggcaaacacgctcaattttatctgaagttctgatcaaaaagttcaaaactcaaacctatttctccttgtcttatagaacttgtgtggaaagcatatataggatcttaatcggtgaataaagttttacagatgaggtcacaactcacaagacttctcgcggttaaaattaactcatatgagatggttccatgttggaaaaaaaaagacatggtttaattaaaagcgaaaaataacattagagtaggtataatgatattgttcatccgtaatttgattattggaaatttgcgcataacagcaccaatactctaaagatacttaatttgatgctcaattcaacatgaacacggaaaaaaaatgatacgtataaggtatgtggatgctcttagatttagcgtaattaaaaattgattaataaagcgtatttaaaaattgattaatatacaatttactttctcttcattatattagaaaataacttggaataatatttataagattaaatacttttacttacagtataaaggttttcctttaaaatatgtgtttgaattaatatgtaagggatttgacacactttaattgcaaactcatggaaactacttgtgggcatattgcttagtgttttcttttatggctttcttataaataatggtaacaaatcaataattaaataatatgatatatattatacttaaatgaaactcataggaaaattttttaagtaaatttgaaaccaaattacaaaataactaatatgatgtgatgatatgtttcccctcgttctttacgtatatatatatatatatatatatatatatatatatatatatatatatatcatgttcccacacacacacttcacaactttgagaaagaaaaaaaacgagagagaaagagaatcgatcatcaacaatgtcgtcggaggaagataagattacaagaatctctatcgaaccggagaagcaaacacttctcgatcatcacaccgagaaacacttcaccgccggagaaatcgtacgtgacatcatcatcggcgtctctgatggtttaaccgttccttttgccctcgccgccggtctctccggtgccaatgcttcttcttctatagtccttaccgctggaatcgccgaagtcgcggccggtgctatctccatgggactcggcgggtacttctctttttactagttccgttttaattgacacgtaaactctctatatagttttgaaataatggctacatgcaaatgatgattcatttcctacttgtggtgtaattactactacacattaacataaataacgtatgataaagttgtggtataaaagttgttcaatggaatactaatttgtttaaatttacacgtaagtcccacataattttgttgggtttaaattagtcctagactaatttaccaaaacaaaaatagtcctagatcatgcaaccatgttaccatgatcatatacaatgcatgcatccatatgtaataaaaaaaaaattcatatttagttagtctcttgagtaatcatattgtaagaaaagtagtgagttataactatatgagttcaatgcaagattaaaaactggataacaaatttaggtatttagcggcaaagagcgaagaagatcattacgcgagggagatgaaacgagaacaagaagagatcgtggccgttcctgaaactggtaagaccaaattacactcaatctaagccatccatatataagaaaattatccggtttaacacattttaattacgatatggatttaaaacagaggcagctgaagtggcagagattctggcacagtacgggatagagccacatgaatattcacctgtagttaatgctcttcgtaagaatcctcaagcttggcttgattttatgatgaggttagtctcactaatgaaaattagtgttattttatgtatactatatagtccattagtattattttatgtatattatatagtcttaattaaagagaaaatcgagggatacttttagatttctgcaaaagctgagcttatactttccaggtgtgggcaagattcttatatggtccgacttccaattttaatcttttttgttgcaacaaataaagtacgtgaatagtaacaaacagaaaacaacaaattacgtgaatataaaaacttatcttattgatttggttaagtttaacactctttacctatcacaaaatgtttatattcctactataagcatgtaacttgttatataagtgagactttattgtttcgttacaggtttgagctgggattagagaagcctgatccaaaaagagcgttacaaagcgcgttcacgattgcaatcgcttatgttcttggcggttttataccgttacttccctacatgctcataccgcatgccatggatgcggtagtggcgtctgtggttataactctgtttgcgctcttcatatttggctatgcaaaagggcatttcactggaagcaagcccctcagaagtgcgtttgaaaccgcctttataggagcgattgcttcagctgctgctttttgtttggctaaagttgtgcaacattagcagtaacaaaactagtgttgcgtttgatgttttgtgtactttgagacttgtttgttgcatgtcttgtggttattatcaggctaaaacttttggcaaccataataaagtgagagataacaattcaaaatattggttacataattactttcctaagctaacattgcagacacacaagttttcttctgacattaatccattcctgaagatttaaaagaaacagttgcagagccttctcttcttaagcgtatccatattggtcactatctttgtcttgaagatctttccaagatccaagattcttcattgacatttgatccatacccttgtctgattctgttgttgttaacgtcacctctctgtctgaaatttgctgaggaagatagaccatgaaccgccacagaaacaggacggttagaagcggatgatacatcaaccgagaagtgttcattttgagatctaccaagattgtcattaggaatccaaactccaaaactagcagagtgatgattgtctattggttgaccaaacaatgcagctaatgtctgtggatgtaattgtcctgaggaaaccagagcttgaatgttttcatatcttttggtagactcagagtcattactctgcgaagcttcaccgcttaatctcttcaaatacaatcggaacttctgcaaatggtattgattcagtcataacccttatagagaccctaataagaagaaagattcaatcaatcaatcaaagaaacctgtaaatgactagccacgttttctctgcttaaaccaggaacattcatcaactcgagaatccgctttggtacagcttctgaaacaataagagagattcttataagcacaaattactttgaatttcttctacaagcaataagatagtgtttaggatcatactgtcaattccaagtttgtttacggcattaacgaattgttgatgcaattcaatagaccaaacaacgcgtgacttcttcgagtttccaggatcaagaagaagatcatcttcattatcatctctatcaacacttctcttcttcttcttcttcttattcctacatttcatcaaactttcctctgagcattcactaaccgaaacaacaacagtctcgaggctaccactgttcttgttatcctctaaagcttgagaacttcgaagctctttcttcatcacacatttccttctaacaacatgttgccaaatgttcttaagctcttcaggacgaataggtttgattagataatcacaagctccatggttgattccagtcatgactgtagttgttcttccatcaacagacatcactagaaacagagcaaatgtaagaaacattgatgcaaagattcaatctttagagacaaaacataacaacagagtcttactaatgacaggaagatccatttcaagaagaccaacttgttgaagaagattgtaaccattcataccaggcatatgaacatcacttagcaccaaatcaaaactgtcttttctttctcttagaatggttaacgcaacatcagcttgtgagcaaattgtaactacaaagagaagataaaacaaaaatgttaaaactttcttgagaaaatctattaaaaggtgggaactttgataaagaattagaccttggtacatgagacggagaagcattttctcgagaatgaacaagcatgaagtatcatcgtctacaacgagtattcttaacccactaggaaactgatcgttgatcggcattaagctttggtgtgagtattgaaaaccctagagaactgagaaagagattttggttggagaagaaagaagaagaaatgattgaagacgtacagtgttgagtaagtagccactggtttgaagagagaggcaacgaaagcgactggtaatagctgtagtggcactctgttgtaattaatccaattggtactacccttatttgtaaacatacacgagtcctttaaaatcttatctatagacaaagtcacggtcctcatgcactacaatatcagaatgcttatcacgccggcgaatttatccggtggcatagccggattattcgttttcggacagaaagatcaaatgactaaaataccctcgctcacaaactcgtataactaccggaaaaaacttttcaccgtccctccagtggcggagagaagaagagctttgaagatgttctggtgcggtgctcggagaagggtgagagacgagggaggtggtgaagatgaagatgaaatgtatggatacaacgaggaaatggcgatgttggagatatatagccagtcgtgtagagaagaagcgcttatagtgacggccattgtcgacgatgaagaagtggaagttgtaatctttaaaggagtgtcgtcgtgcttgagcggagaaacggcggtggatccggcgaggagtgtgttgccggagagagcagtcattacaaagattgatagagtgagaggtccttttgatccttcacagattcattatattcaaagggacatctcttttcaagccttcaaggagaccagactcaactaatgttagtgaatgttgtgtctggatcaatgaaactaatgacaatttcaattttttcactaataactctcacctctgtttctgaactaatttcttaaatctataacataccccaaaatgagaaaaatggacaaaggtaagatagagagagatacaataaatcacacactaagctcaagttagtagttaaaacacaaacctaactcttttctatatatgaggaaaacaataaacatcagccaagaaattaaaaatcagtttttaactttgaaatcttactatgttaagaagcacacaaacctcccatattggatttctatatttgtatgctttttgtcattccttcaatctattaaccactgaattgagattcatattttgctcgtggaatcgacttctttgatcactgcgtgctcctcgtcatccccattcgtcctgagcctctgctaaaacaacaatgcaaagcaaacgttcaagtgttaaagaaaactaacctaaccaacttataatcgttacattgggtcattataataagaaaacatcaggtaccttccagaaagtaactgtgcagttgttgaagctccttttgagttagtagagtgacgtctcgttctactatctgatcctttgttatccacacgcatagctgaaacctctttctccattgctgctacttctcttcgcatcttctttgcttccacttccatcgcctttgttagtgtttcaaccttcttggccaacatctaaaagcaaacacaagcccaagtattttgatcagagaatataaataaatataagcaaacgtttcttggaaaggtgtaaaactaatgactaacctcaatagcttcgtctttatctctaaggctttgatctttatcattagcagctttccttaaagttatcacctccttttgaagcaaatcatgtaatactcctgggacactatcattatttgtccctgctgctttctctgaatctccttgttttgttgaattaggtgacccgcctccgcttgttccttcagaagattggttcaatggaaacttcgatctgggttcgtttgttagtactttactcctatctaaagatctactgcctccgtcaaatgatctggatgttcctttcgcatgcttcaatattgtgcttgtactagcattcaaagatctaaactgagaacttggtgacctcttggagaaaaatccatttgatgtcagtttcggaataatatcagctccgccaagggattgtcttcgagaaggcccgttgctcatacttcttccctcaggtgtcgatcggtttccactgcttgaaggccctcttaaactctcttctaagactctaagccgcagttgaaatttctcctgcaaaaggcaaaagcagcaattctaattaaagccttgatacataaggacataaagaagactaaagctatatggatctgaactccgaattcttacctttagctgagcttcagattttgcagctcgatcagctatggcaagtttgtcacgtagttgttgcatttctccctgtccaaaaagaaacaggaaaatggttaaagaatgcacttactcaagttacaatggttcctgtgaatatgaatcacaactcgaagcagtaacagaagcccaaaaataaaatatcaaaagtaacctgcagaaatcttcgttcttcgagccattgcttcacaggcatcactttatcgctaccatctttccactcatttgccactacagttgcaaccctgcttgcacttactttggcacgagccagttcccgatcaaggattctcctctcttcctaatgaaaggattaatggccatagctatgattagcacaggaattgaattttaagtacaagggtagcaataggctaatgaggcactaaacgtgtaatttaattattacattcatttcttgaaatttcctctggtaatctctcactgcatttgcagctgtaccaccagcaagaacagcttcttcaagctcccgtacggtctgggtaaacttttcaacttctgcaaccttttgtctgtgcaacttgtccaaaattctgttctcttcctaatttgaacaatcgataaacaaggcatgctcacgaaaacgaaggagagagatccaggaatttatagtactgctgggtaaaggaggcgaaagtgatacctgacaaatttctatctgtttcattagctcttggtttttattctggaggtcatcaaccattgaagcctttgcaagagcagactgaacagttctttcagcatcaagcaaagctgcttccttcgacttggttagacggtccaatgctctgttgtcatcttgaagtttaacaatctacaaatgaagaatgcaatgcccagttattaaaaaggttccaagactcaataagcaaggaaataagagatatagttgattgaaaggaagtaaaatacttcatgtctcgccaacttgagttcagcctctaaaggagcgagaatagcttcaataggaggcatatcgtcatccttttgagcagcatgaacccttcgaagagtggcttctgcagcaaattgagctgccattgaagcccttttttcttcgtttattttcttgatttcaaggttctgtgacaagatgcgatatcatcaaatacagaatccagaaaaataaaagagattggaaaatgaaaagcaactgagaaacattgcaaacatactttactgtcaagaaggttttcagttagtttgagcttctccgacatctttcccaactcttcagtaagcttaaacaatcaaatgaaagagtagagcgtcagaatatacaaagatggataaaaaaagatgatttatgtgacctaatatataaacttcatataagattttgcaggcatgaacacaattttttctcgcaaagcatttcaagatctagctataaacaataatgaaagccaaatcataatacatcttcttaagacaaggattcaggaatatgtatatgcttcgtggagcgactgaccacaggccaaacaagagtgaaaccaggcttacaaaggaacggtaacagaaaaaaactacagccacatatcggaaaactaatgaaggtctagaaacgaacccaagagtaattcagttcaaccacctatactacataatgcaacttgcgcaaaaacttagagccgaaggataacatttttcagaatctaaatattgaaattgtgcttcacaaatttaacttcttcctaaccattgattagacccaaacaaataatccattaagtcaagctatatcttcaatcttctgttcatgtgaaatattcagttgaatcaagtctaatccaaacaacctttacaggacattgtgaaatgtaaggaaaaagacagattaagtgcagatattacactaacctcttcaacagccttctctctttgccgttcagacaacctcaatgctttgatctcagcttgggattcagacaactcccgatctttatctgagcaccaaaaagtcaaagtttaaaaccaagaaatgacattcatgcacgtacggaaaagttcaaacatatatccaaaaacctaattataccaaattacaaaatcaaaaatgtcaacggaaacttgaaatcaaccaatagaataaaacagatcgagaatcatagagtacctctgacatcgttctcaagcctattaagctcaactttaaccggatctgagccatggagtaaagtaatgaactcattatcggcgtcaaaactcggcttcattgacctccgtcgtgttaaacccttacttccacctcctcctcctccttcacggaaagacgatgacatagtcaatgacggtgacgaaatcctcgccgtcgtaccaaactcactcgccgttggtcttccattgttaacctcaaacgcatatccaccttcctccatttattcccgatctataaaacccttacttctctaatctacacaggcatcaaaagttccatatctattgaagtctcaaatccatccaccagaaacaaaaaaaaaaaatcaacacatacctaaaatcagcacattctcaaatcgagaaagcaaaatgtagaaataagacgcgcaacaacactgaatcgtcaagaagaactgatgaaccaaaagtgttagggtttgaattcggcttcaccggagattctacaaaaacaaaagagaaatagcaagttttttttggtagagaaggatttaaaagaggtttatgctaagtcacagcgagtagagagagataattaccgttttcagattttttttacattttcatgtttatttaataataagcttacaattaaacgctgtcgtttagaaccgaacgacggtcttctttaaccttctagggtttaagccttctccgttagatttagctttgatgtttaaaaatcttttcaaagttgtaacctttcgaatcttctgaagaaacccatgtccatgaatggtcagagaagctcttcaatttctttctcgcctgagaaaatcctcgaatctcccagacccattcacctgcaacaagcatattcatcagctaatcaattccaattgcggcattctatctctcaaattcttagcttacttagtctccagaggttacactcctcatcgttcttcattcaattcggtcgtatcgtttgtttgtaaactagggcaagttaaattcgctgaagatatcgttcactcgatgcctagattcgggtgtgaaccagatgttatatcttataactctctcattgatgggcattgtagaaatggagatatcagaagtgctagtttggttttagagagtttaagagcctctcatgggtttatctgcaagcctgacatagttagttttaattctctgtttaatgggtttagcaagatgaagatgttagatgaggtttttgtgtatatgggtgttatgttgaagtgttgttcgccgaatgttgttacttatagtacttggatcgacacgttctgcaaatccggggagttgcagttggcgttgaagagttttcactctatgaagagagatgctttatctccaaatgtggttactttcacttgtttgattgatgggtactgtaaagctggtgacttggaggttgcggtttcgttatacaaagaaatgagacgcgttcggatgtctttgaatgttgttacttatactgctttgatagatggtttctgcaagaagggggaaatgcagagagctgaggaaatgtattcaaggatggtcgaggatagagttgagccaaactctcttgtatacactacgattatcgatggtttttttcagagaggagattcggataatgccatgaagtttctggccaaaatgctcaatcaagggatgagacttgatataacagcttacggcgtaatcatatcaggcctttgtggtaatggtaaactaaaggaggcaactgagattgtagaagatatggagaaaagtgatttagttcctgatatggtgatttttactacaatgatgaatgcatattttaaatccggacgcatgaaggctgcggttaacatgtaccacaaattaattgagagaggctttgagcccgatgttgtagctctttcgactatgatcgatgggattgcgaagaatggacaactacatgaagctatagtttatttctgtatagagaaagctaatgatgttatgtacactgtgcttattgatgctttgtgcaaagaaggagactttatagaagttgagagattgtttagtaaaatctcagaggctggacttgttccagataagttcatgtacacttcttggatagctggtttgtgtaagcaagggaatttggtggatgcgtttaagttaaaaaccagaatggttcaggaaggtcttttgcttgatttgttagcctatactacattgatttacgggctagctagcaagggtttgatggttgaggcaagacaagttttcgatgaaatgttgaatagcggaataagtcctgattcggctgtttttgatctcttgattagagcttatgaaaaggagggaaacatggccgctgcttcggatttgcttcttgatatgcagagaagggggcttgtaacagcagtaagtgatgcggattgcagcaaacagtgtggcaatgaagtgaactgttcgtgaactttcttatgatttgagctatgactatgagcatcagctgtattctcaaatatgggcaaatatagaaaagggcatttgtaaagtgtgatcttttacatttaaaatggatgcttttaacaaaagacacatgactttgatagttatgtaaataaatatatacagaagctttttaattgaggaaatggaatctgtttctatatgtgcagaatcttattccctctggttggttgagttttgtcttcaagattgatcagtggttcctttaagaatgttgtatttgcaaagagggcatgttgctctcatcttaagccatttcacaatacaagtcgaatgaaaatggtggttacaaggaagagcatgaagctctgcgccatcctcatatgaactcagacatatgcaacaatcctgttaagaaaaatcaagtagaagaagcctttgaaactaagcaaaagcagagttcataagtaacaaatcgttgtcaaactagattcgtgtttaccgcatcctcagcaagcagtgttctttcagttgctaagcataagccattgatcggtataggaaccattttaccaggtccagtaatgttcttctcattgctatggaaagccttaaatttgtacaagggaagaacaccgagctccgcctccgatacaccttcctgtataaaacccgcaagaaaaggcgtctctaagttctttaaagtagtagacaacaaagatcgatgagatggcttcataccgttccagcaacggcataaagaagagcaattatgcaaggaagacagcaacaaagagctattccaacaaggcaagccaaaacaacacagaaaacagcaaagaagacgtcaatcgccaggaaaatcaccgataacctgcgaaaaaaaacccgtaagatttgggaaacacacaaaagcaattcttagcttttgaatgagcaatatgttaccagtaaagattaggagcttctcctaaaagcttatcaccaccttcaacaacccagtagaatccaattatccaccatatgaatgatatcactgtgtttatcgactcacatctcttcacaaaactgattacaataaaacatcaatttcataatcataaaaccatgaaattgagatttttcaataaccaaaacctgtaagttgttgaattgtcatcactgtcttgttcataatcatactcaatgttgtaatcttcatgatcataagactccaaatccctagctctacgagttgagtttcttctccaatactcagaccaaaccaaaaccacatggaacaaacactgtaacccatacacacagatccaaaccctaatcggttcattaggtctttcttcaacggtaccgacaagcataaccgctgacgcaagaactaaagcagcgttccatagtatatcagcagcaactacaggcttcgagtaaccccaatcgattcgtctctcctcgagagcacgcgccgctgtttctctaaccagcatcgacggtgctcggtggccggtgatccgtcctaatagaacggcgagagctgtaggtctggctgatgaagaagaagaagaaaaagagccgtcgtgtcgtggacggagtagaggcgcatgttgatcacgcgccgccgtggaatctgaagaatacgatgacattagtaacgaagagaattgagattcttctttctctctgctctagaaaacgctaagccatggcggacagttttaaaaaatggttttagttaattaacattaattgaagattagacacagtcttataagttaattatcattatcacaataagtcgtacgtctttaaccttaaaggatccggttaggagtggccattcggataaacgggtcggattcgggtaaaattcgatcgaatacggtttttcgggtagagaagtttaggattctatagggtaaatctaaaatatcggttcgtgtatagattttaggccttttttagaaccatacttgattttgcgggtaaatatgcaaatttttcggatttcgaataaaatttaaatttttgattaaaatattcatgtatttttgggttcgacttcagatttggtttttagggtagaagaatttaggacacaagtaaattttcggattcagattcagtttcgggtaattggttccggtttttaatacgggtgttactttgttagatagaaattggcgctaaagttggtaagtttagttactactgggttaatttaatttactaggatcaaaacttttacatatgccgacagaaaaacgacaaaaactgaaaacacttctcagtgttacaagaatcagtgatttagtttgatagcattgatgatttcccagccaagctctaaatctgcgatagaccagttgcaacacaagaacacagcttcactactactactactgcttcgatgcatacacttgtcttttagacacaaagagcccttgaaagatgcaacctgcaaacagttttcagattcatggatctgagcaccagacactgtcttcaagatctttgcagacaattgtttgattagatcaacatcatcatcttctgattctcctttaactttcactggacaacaatgagctaaagagaccacatggtttttctcatgtaacacctcagagatttcatcttggtgaactatctttgcctttttgctcttctctattaccaaaaccccgtctgcggttctatggtctgtaacacggagctgagtagagtttgagaatttgaaattcgggttggagcagctttttaggaacatatcagaagcgtttgcttttatataagtggttgaagcgaatgaaactgtttcgccattggcagggacgaaacaggggatgtcaagctctgaggttatcttttccttaagaatcatcatgctgggtttttcgccgtgcacgagtacaacgttctttggggaaaggaactttgtgagatccattattccttttgcatctgtgtgaggactgaaagccacttgatgtacctgataacaacagaatcaacaagacattttagtttaggttcaacgtgtgaattggacgcattgctgttttcgtgttaaggttacataaattttgtgagaaccagaagaaagagtaaacaaaccttgcaacggacatcgaccttggtgccattgtagagatcaaccgtcgtgggtttaccagccatcagtttgtgcccaacggtcccagccacagagtatctgtaaaaaacggatccataaatggatgaaaagagatacaatttcgtgttagatgctatgctaggaaaaaactgaattgctaataaaggggaaacacaataggtatagtacccgggtaatgcaacaagattcaagggagaaggagcccagtgcttgaacacttcaagtgaaaagccagcacaaagcataccaggtgtggcaaagagaacacatggcccaggagcatgtataagagatcgatcgaaatctttaactgcagaatgtgaaggtagtagttagaaagcaagcagagttgtacagctaaggtagtggataagaacaaaaaatggacgcaaaggatgtattagaaccactagtttggttcttatttttcaagcacatcagagtttcggttccatatgatataaatttcatcttcaacgttctaaagttatttgcaaatggtagtacacataccattcttaaaatcaaatgggttatgcgtattgtgcttttctttaacgttctggcttgtccagctgatgagcattttgtaatacatatttgcttggatggtcaaacctgcaaaagtacaaatttatcttcagggacagcaattttcagaagatagagatcactattcatgaaatagagtcacgactttgttgagctgactaatctgcagaattgatttcatatgaggattggtggtgatttaacagacctgatgagaagtaaattggaacctttatattcatgcgttcccagtaatcatcaagcagcatgcagagttcctgaaaaaggaaacgcaattgtcaatgagacataagagaagcaaagacaagtttaagtaactgacttcaaagctctgtaagaagacagacctgagcccttccaagagcaaatgaaggaatcagcgccttccctccgccagcaacacatttatgaacctggaagagttttctgagatatcagacaattaccaaacgaaagcttaagcatttcctgaaggggtatattgatcagaaacaagccaaaggtgatgcgggtaattataatcaaaaaccatttaagaacaaatttagaaaccatgtgttaatagttacaagtagacatacagcttgaagaaactctctctcccggggatattttgagccgcgaatggtagttgcatatgtggacctaaaacggcatagttaaacctatatcaggtaaacttgttctttctaagtttgttgaaaaataccagcgaacaagtttgtatttgttttccatactctgaaatgagaagatccaactggagtctgtcaattttagcagctcctagatgtctatctgtcgtcatattgtaatctccagtgtacacaatcgctgcatctcccatctttgcataaaccatcactgctccaaggaccttatgatcaatacaaaataagctttaaaaaatacagaaactctgaatataaaaaacacagaaagaaattcactaaaaccagaacgaatgtcttacatgccctgcataataagcccggatttgaagatcttcatcaacctgaattgtttgcttcaaatctattgcaattactacatataaaaaaacaagaggaagtcaagttatagacactgcatctgaattcgtgcacaaagacctcaaatgaactaaatccaatattcaagtaccttttttcatgcagtttgcgatatgggtagtggtgaatagctcctcctcgcctcttctatccaccatcactcttcggtagtcctcaagcattaatggagacaaagcctttgtgggatactacaaaagagacaaatcaaagtaaacaacctttaccttcacaaaaaaaaaacagtcagtcaaacatttcatcgaacaccttgaggacaatataactcaccgacatataaatcggaccattgtacccacaaacttccgtgaagtaaggaagcgctccaacatgatccatatggctattaacactcacaattaaaacccacaaaaactaaaaaagtgaattttaaaaaagggacaaattctgggtttgaagaatcaatacaagtgtgtgatgatgatacaagagatcgcgttgtcaaaatcaccggatttagatatgagagaaaaatttgggtaacgattgtgatcatcacagcccatatgcatcccacaatcgaacattatctttttaccattaatcgtcactaccacacagctctttccaatctcttgtccagcacctggatacaacacaaaaaagatagaattatacagaaattgaaattgtgaaactttgaagaagcaaagagagaagaagaagaagaacaaaaactgttaccaagtacgagacaatcgatagccatagttactgaagaaataaacaacaatttgagtttcaaaactcgtcgatggtcaaaaatatcttactcgttgaatcagaacacaaattcaagtgaccggagaaaattttgaagggggcgagagaagaaacagagttaggtcgacaaacgaatttgaatggcggcaaagtgttcagtgacatcggaaccgttcggagttattacacgtgtctgatccaaccgtcgatatttttgtggtgtgaagcccaataatagttcttctcacggcccattaaatttaaaagtttgaaacgacaacgtctcatgtcgtttttaatctgaggaagaaaaaagctcgtaactaatccctaaatcaagagagaagtgagagacactgagactttgtagttgaccggatcattctcacttcgccggccgacgttcttccttccgccgtcggtatctatatttacgatccacgatctctcttgctgtttctgtcttcatcggtgagtaattttttactgatcttccaaatcctatcaattcaccatctctgagctctttcgttgatttgagttttgttcttactgcagtgacgaaaatggctgctcgtatcgggatcttctccgtcttcgtagctgtattgttatctatttctgcattttcctcagctcaggatctccagatcgtaaatgccgagcgaagggtaagattctccgatctatcttcttcttacaattcataaacttccttaatggatcccgtttctccgatttatggaaattcaagttaatgaagttgccgttgggctttgctgtttctccgatctatactcggtttgtagaattactgtgtgattggtcacttcatggttgatcatcatcgataggcttcatatgtatgtacattgatagatagtgtgacttttcatcagttatacgtttgatttgagtaattagaaagtctaatgatagaacctgtttgcaaaattttcttgcccgaaactgaaatgcttctcctttgtgtttgtttttgtctacagattgatttaagctcacatatcgtgaaggccttcttgactctcaaggtatttataagcaaatgtttataatagttattcctattgaatatacactggaaggttggaacttagaattggaaaattaaagcttttttggatatgttatatgaaactgcagctgtttttcttttagtcaaatttagtttattgtagtgatacttgttgtaaaggttggaactttagtggctttgattcgttgtgacagttaatttgatattatcgcttttctccttcatcatctttaagtttttctattaggaggtgacattttcttgtctggatttctttcttcaggttgaaaatattgggaaagatcctgctgcagaaatgcttcttgctttcccacctacccagatcaagaatttggctatggtacaagccctggcaactactggcaagaagaagaagaaaacttatttgccattagatgtaaaaccaactgaacaacctgatgcaccaaatgacactggatactaccgtgttacgtttattagccccttaggtccgggtgaaactgtttcacttgaggtgctttacatattgactcattccttggaacctttcccagtggagataacccagtcagaatctcaattggtttactatcatgatagtgcagtgatattgtcaccgtatcatgttaagcaacagacaacttttattaagactcctagtactagagtagagtcgttcactagcattgaacctgctaaccgggctggcaaagagatcaaatatggaccatatgaaaatcgtgcttcatactcttacacacctgtcatcattcacttcgagaataacagtccatttgctgttgttgaggagcttgtgcgtgaaattgagatttcacactggggtagccttcagattacagaaaattataggttgactcatgggggagcgaggcataagggtgttttctcaaggtatgtaatgggactaataacttctataatgtatgaggtgacatctgaaaatttatctctaggagttagatgttgcagaatttcgatttatgtgttttgagctaactgttaaggtgccattttccatttctgcaggcaacttttctctgttattgaaggaaaactgtctatttaattacctattttactgttacttgtgaaagaggtcaatggcgaggttgtgttcatatgtatgctgttatgctgaaaatgtttctctgaattctcaattttggcagggttgattatcaatctaaacgatcggtcagtggtgcatcctctttcaatgcgctccttgcagtcctacctcccagagtgaactctgtctactacagggatgagataggaaacatctctacttcacatttgcgtacaggctttagaaaggtatgcttggattgcccacttctctttatctgtagccatttaggcagtgatatttcctccctgagaaactctgcttaggctctaattgtataactctaattggtttcttattctctaagttcttataaaaaaattgttggtatttgcagtcagaacttgaatttgaaccccgctacccattatttggagggtggagtgcaacttttatcatcggctatagagttccattggaagactatctctttgaagcatctgatggcagacgttacttgaactttacctttgggtgcccgctcgtcgaaactattgttaacaagttgactatcaaagtgggtttaattagcattttctactaatagtaatttccttatattgttagcagattacacttaacacaggaagatatcattttcaggtcgtgcttcctgaaggatcaaaggacccttctgctgttttgccctttacagtcaatcaagagttgcaggtacttcatcagccacacatatacatgaattgcattttcaaactatggttagtaaaacaacatgtatctataatggtcttgtctcaggtcaaatactcataccttgacattgtgggaagaaccgtggttgtgttgcaaaaagataacgtagttcccactcacaacgtacccttccaggtaaaaaaataccttaacacttacagctaactagcaatttccacagacttaactatatcaccataatgagccaattcctttctttctgctatgtgtagtagtattagaagaaccctaaaaatctgagtgtattagtgttattagcaataggctcattttgttccataagttacaaaattgcttaacatgtgtgacgattttgcaggtgtactatacattcaaaccaatatacatgctagcggaaccattcatgcttgtatcggctttcttcttagtatttgtggcttcgcttgcgtatgtacacatcgatctcaatatcgtcaggaagtagaagtcttatcaacagtccttcgctttcacttatagactcgtaaaagaaaatacttttgatcatcacttgaagaactaaactttgtaggtgttgctgcttttagtagagttatatctttgacactactttgctctccaatcttgatttttcctcaattttatttacagagaatctaaagtgtttaatccatccaacaagtgaagtggaaaagagcgaattgccaaattatgtaatgaggaaaatgtttcaaagtaaatcaagataacacaattacacaacggtaataacaacaaatgcataataaagtttacactaagacaacaaacgctgatcctaaacttccttgccttaaaaaaaacttgcctttaaaattttgtctccataattttaacaatcatgaccggagtttgaaaagagatcactaaaccggattcttcttcggccttcctcttcctctcttcttcggtgttccatctgaattaactccaacaccattattactcctcacagcctcattatctctcttcgccgcaccacctgaccatccatcaaaactaacaccattaccacttggaggagctgcaacgccgccggatgagaaaaccggaggcatccaattagggaacttagctgcatctactccattagcaatggcagcttctcctcctttaccaccaacaaaccccatcggaaaaaaaccccaacaacaataatactcatctttaccaggtatcaacggaggcaactgaggaatactcgcagcgtgaaacgctctttgacagttttgacatctaatacaatactcttgataaaccctaggatactcatgaagactgtaacagtacggacacgccgtccaaaacgtagacatcttctcattcgttgttgttttcttcttcgatttctgagtgttgagatttactttagtgaagatgagattcaaatctccatcgaattgagatttcttcgtaggtgttgatagaacttcccatgcatcaagcacgaatctgaaagcttgatcggcgaaagggaaacggtttttgtcagggtggagaagaagagcaagacgacggtattgtttcttgattagatcgttgtctgttgatgattcagttagatcttcgatctgaaggattttgtaccagtttggttggtttttgatacgattctctggtgctgatgagagtaagacatcgacgacggcgaggatttgatcggtgccttcgaggagtggctctgtctcttgagctaagattgcaaactcttttgaaccgtttagatctcgtgactcgagaagcttctccgcgattccgagaagacgttctgcttctgatcggttagggttgttgtctcccatctttcttcttccgtcggcgatggcggagaaatggtgagcagatctaaatattatcgcctcgacaagagacgatgaaacaaggctctgattggctgtgtgtaaaaatggtcgggggaaaaaaaatagtaacattggagtaaacggaaactaaaactttatttgttaccaaatttatttagtaataaaatcatttcttcatttttatgttattatttttcacaattttattttatgttattatttttcacccttttataatgttacctacttacaattcgtttcctatttcgccatatttataatattgcaaataaaatccagctttgtgtcaccagttacaaaaataatatgattatatactttattggttttattaacactacattaaaaaggtaaataaaaggaaaaattactatagtatattggaaataaagtcggtatttgactcactagagagttataatttataaatgagacataattattgtttattcatcttattcagacaacataactaaaaaatatatggtcaagataatattaaatgttttaagaatgaaaattttctagagctaagaatatcggaaataaagttagacgtattatgtttaacagaaaaagaggcagaattatggcagttagctcaatttgagctcaataccaaaaataacggttccatgggatcgaaaaaacaaattcgggttcagaatatatcacacgataatatttattctggtttgcgttgttttgtggacggatcttggaaaggaagcgataagttttctggattagggtggttttgcagatcatcaaatggagactcgccaaccatgggagctgctaatcttcgtagaagtctttatccactccatacagaagtcgaagcactactttggtcgatgaagtgtatgattggtgccgacaaccaagaagtagcattttttacagactattcagacttggtgaagatggtgtcttctccaaccgaatgaccagcgttttcaacttatttggaggaactaaagaccgatataaggaggaattcacaaagttttctttatctttaatttctcgaactgcaaatgtaaaggcggacaaattggcacgaaaaattcatattgaaccgcttcatgtcacttttataaataattttcctcacaattggctcttttgagctctaaataaaatctgttgacaaaaaaaaaaaaaaaatcagaaataaagttcatctatgactacctaccaaaacaaaagttcatctttgattcactcacaaaataatacaaataaaacatgaaaattataaaaacatttaatattatctcttaccataatttatttatttgttgtacatagtacaaataaaatggaaataataattattttttatttgtaacgtttgccggccgaataaaatattaaatttatttgcaatactactcacaacaaactttacaaataaaacatgattatcgttttttcttttcgttcattcaaactataaacaaaagcaatgaaagcatgataagaaatgatattaaatgtttaaaaaataaaatttgatataactatattattggaaacaaagtccatatttaagtcacctataaaaaagcatgatatgaaataataataaatgtttaaaataataatataatatctaatggtatttgaaataatgtatgtgtttgaagatgttataaaaatgttaaaaataaaaatataattatcaatattgataataatattcatattgatatgaagaaatgatattatttccaactacaatttatttacttttcaatgtgatgtgaataaataaagaataatcatgttttagctaatgtttcaaaatagaaaaattaatataaccaaatactgtaacctaaaattgtaaaaaataccactctagtaaataccaatattaccccggttagctgctactaacattaagggtgaagttgtcatttgatacagtgatcacgcacttttcacttgtcttctttattagttttttttccttgttttttaaagacatcacttgtgaccaaaaaacaaatccactaagaaagaaaaacaaattaataaaaaaaaaagatcagaaattagtttgtgcagaaatcgaattggagaaaccgagtaactatggtagccacagatgagttcatcgtttttgaccagatctgattgttttcgtctttgccgttgaaataatcctccgctccttcttctcatcgatttctccgatcgcgattttggtttctcgctctcctctctcgctgtggattttgactccgagagaaggtttgattttcggtggatttcatctgacagacatgtcagacgctctttctgcgattccggccgcagttcatcgcaatctctccgataaactctatgagaagcgcaaaaatgctgcgcttgaggtttcaattttctcatctcctctctctttctttcttttgcctcttagggtttttctagtatctgagattatagtgttttttttatgccttttgttgtagcttgagaatattgtgaagaatctaacttcttcgggtgatcatgacaagatctcgaaagtcattgagatgttgattaaggaatttgccaaatctcctcaagctaatcatcggaaggtctccaaattttgagattattgctttgcatttgcatttggttaacttagatcccaggattttgagaataggattttgatcattgaaccattttccggctgctttgttgttgtatagggtggtctaattggcttagctgctgtaactgttggtttgtctacagaagctgctcaatatcttgaggtataactgtaaattattcaaacgtttgcactataacccatagttaatctgctcatattaagattttaaaagttatgtttagtgtaatcttttctatgtataaatccatctgttgtattagtgtagtttcgttcttgggttataggatgttttctaatttttctttttgatctatgacatgtgaagcaaatagtgccacctgtgattaattccttttctgatcaagatagccgagttcggtactatgcatgtgaagctctctataacattgcaaaggtaaagacttgtagtattatacctgtatacttgtagtattatacaggtattgatgcgccacgccttcttttctggtttgctacaggttgtgcgaggcgatttcattattttcttcaataagatatttgatgccttatgcaaactctcagcagattctgatgccaatgtccaaagtgctgctcatcttttggatcgccttgttaaggtgtggacatttttgtttcttaaacttgagtggtattttaatttaaaacatatgctgaatagatttaataccttgtaaagcaggatattgtgacggaaagtgatcagttcaggtgtgttcagttggctttttttgtctgtttatgaaaataaatctgttagtattagctttactcgactctcgattttttgggatttggtttgcagtattgaggaattcatacctcttttaaaagagcgaatgaacgttctcaacccttacgtccggcaatttctggttggatggatcactgttcttgatagtgttccagacattgacatgcttgggtttctgccagactttctcgatggtaattgcaatttgataactttagctagatgtatatgaccgtattcaagtatagttatttgtgtactcagctgactcaacttgtaataaatttccagggttattcaatatgttgagcgactctagtcatgaaatacgacagcaagctgattcagctctttcagagtttcttcaagagataaaaaattcaccagtaagacttctgtttcgtccttagtttgggactaagataaaaatgctgctataaaaatcccattttctgtggatctatcttatattgttagttcatgtttgtttttaaagactgtttttatgtttcaatggtatattactgactggggcagtaatattgttgaagtctgtagattatggtcgcatggctgaaatactggtgcagagggctgcttctcctgatgaattcactcgattaacagccatcacgtgggtaagcagaataaaccatgcttctgcttggcgtcttccagttatatagattggtactattttgacttctcgggagattcatatactaagaatatctgctttttattaaatgttgtagataaacgagttcgtaaaacttgggggagaccagctcgtgcgttattatgctgacattcttggggctatcttgccttgcatatctgacaaagaagagaaaatcagggtggtaagtttgcttctcctcctcagtgatggaaactgtaggttttgtatgcatctttttactttctttgttttttgatttttatttgcataaggttgctcgtgaaaccaatgaagaacttcgttcaatccatgttgaaccctcagatggttttgatgttggcgcaattctctctgttgcaaggaggttagtttttctctattgttgtttttatatccgtttgaatattattaaatcgcgcctgtttatttgtgagtttttgcattgagcaggcagctatcaagtgagtttgaggctactcggattgaagcattgaattggatatcaacacttttaaacaagcatcgtactgaggtgaagaaactggtttttgcttgggcatcattcttttctagttagcctttttgtttatcgcgttatagctaaattggtaatgctgcaacaggtcttgtgcttcctgaatgacatatttgacacccttctaaaagcactatctgattcttctgatgacgtaagttctatctccctgactgttcgtttgattggttggtgaactttataatataaaggtttggttttgtctagtaataaacttatttgatatttgaactatctggacttggaaatatactttaggtggtgctcttggttctggaggttcatgctggtgtagcaaaagatccacaacactttcgccagctcatcgtatttcttgtccacaatttccgagctgataattctcttttggaaaggttagttgcatctaataatccgccttttaggtatctggaaagaacatattatttagttggtcaaaacatatctcgttataggcgcggtgcccttattgtccgaagaatgtgtgtacttttggatgccgaaagagtctaccgagagctctctacaattcttgagggagaagataatcttgactttgcttctaccatggttcaggtattatctcatttcctacatttcttcaattaaggaatgttctaaggtcactacagtgggttgattggttttttctgcatgttttatatggccccttgagagttggctggctttttcgattatagttttcccactttgatgtattaaccaatagaatgtctttttctaatgtttcaggcattgaatttgattttgcttacttccccggagttatcgaaactgagagaactattaaaaggttcactcgtcaatcgcgaagggaaagaacttttcgttgccttgtatacttcatggtgccattcacccatggcaattataagcctctgcttattagctcaggtaaataaacaaaaataaatgtaaacttgatacaatatgattttgttgaccatctgtattgaatatcgaggaaatgattatttataggcttaccagcatgcgagtgtcgtgattcaatcattggtagaagaagacattaacgtcaaatttctagtacagcttgataaattgatccggcttctggaaactccaatctttacttaccttagattgcaggtttgcttgaattatctcaaacaatctgtatcctctccggattctttcgtttccaccaaaaccttcttttcttctgcagcttctggaaccaggaaggtacacatggttgctgaaaacactttatggtcttcttatgttacttcctcaggtaaaaggaaaagaaagaagaatcagacatatttggtttatgacataattactattttgtttttgaaaaattgatagttcctggttttttaatatatgcagcaaagtgcggcgttcaagatacttaggacaagactcaaaactgtgccaacgtactcattcagtactggaaaccaaataggcagagcaacttcaggagttcctttctctcagtataagcatcaaaacgaggacggtgacttagaagacgataacatcaacagttctcaccaaggaatcaattttgctgtgcggctacaacagttcgaaaacgtacagaatctacatcgtggccaggcaaggactagagtgaactactcatatcactcttcctcttcttctacatcaaaggtacacataacgctacacatttttgtctgttaacctgcggtataatataacaggatggtgtaacattattgccatttttgcaagatttaccggttttttcccttagcaattggagtgttaagagatatggatagtctcattgtgctttaatttgatgtattaggaggtgaggagatctgaagaacaacaacagcagcagcagcaacaacaacagcaacaacaacaacaacaacgaccaccaccttcttcgacatcatcatcagttgcagataacaatagacctccatcaagaacttcaagaaaaggccctggtcaattacagctttaacctacctggtaatcataaataataaataatattccatccccgacaatcatcatcttcatcttctttgtgtggacaccaccgatcccttttgtctcctgtaaaattgtatatctctcttttttagtaactcttcaagtttcgacggaacttgtggaaaagctacggtcgtgtccatcatctctttctctctgtcgggttttttttatttacgagagattcttcttcagtccctcagtctacctttatattgtttttttgggggtttctcgtttctttgaatttgtttcattgtttggagctttttatatttttaccttatgtggagatgtaagaaaaagaagtgatcatgtggttttgtgttgtttttttataactggaaaaccacatgagtttgtagaggtcacttattggatattttatgtcaaatgatgctcctttttacattttcctcatctcacaatgatttacatcttatacaatgtttgctaataagagacattacacttcactagtactcgaatgaattgtacatatactaaccacttccagtagtagaacaaaagaaacaatacagatatggcctgtggcgactttattgctatatatgatactaatatgtaccaacaagatttattctaagaatacaacacagacttgcgttggaagaaaggcaaagagaagagacgatctatacaaagacgcttaagaaacttaattcaaagagcaataatcttctcgaaatctgattcatcttcaaaatcggatacatgatgagagtaagaccatgaaaacgacttactactccctctcctaatccttctctgtgaatcgttgccgctcctaaaccgctgccgaaacacgaaataacacatacttgccaatgtccctaccaagatcggtgctccaagcaacgttatggtaatcgccatccacgagttcccctttccaacaaccgcaaatgcaatcgccaaaaatgctccgaatgtgcaagcacaagctgcccacattagcttattcactacagacacaactttcttctgcgcccgtgtgtcccacgccaccaaagttatttgaactaccacaaccgctaacgatataaacagagatgtcgcgtttaaaagacagaacacgcggaatccggttctccctgcaatattggcttgtcccacatgcgacccctccgtgaaatactgacccggcaagttgaatatggccaagaacgctatggaagcaaacagaaccgccactaccgttatggagttagtcgtgttctgaaccgcttctctgtggagtttcctcagctctttcgcgatcccagagacacgacggttggttttctcattctgcaaaagctgcgattgcacctcgtgtttgatatcactcactgctcgcttcaatgctctcgcctcatcttctcgaccaatgaacctcccatgcttagccccagcttctaccaaagcctcattgatctccaaagcagattcgctatattgcagcttatccgccaaatccatagcagtttctttctggttgttaatcgcattcacttcaatcgccgtaaaggtcagcaataagctcgttatctaataaacaaaacacaaaaggcatttatgtgtcaacccctgttcttgaaagctaactagcaatacaagaagctaagaaaggagtggagtaatacctgtggccgcgcctttcgagtagcaatatgcaaagcagtgttcccttttcgatctctctcattcaatattgtgtaatcagcctgcaaaatctcttcgactacttccaaacttcgtcctttaacagccatgtgaagagcagtctgacctttcttatctttaacaccaacaatcgctgcgtctttctctatgagagctttcactatccgaagaagcccgtaccttcccgcagtgtgcaaagatgttttcccgttctttctcacaatcattgcacagctaggatcaacatcaagcattgcatttactatttctaagtgatcttgaaccgcagctgcgtaaagcggactcgtgttggaagcgtcgcagattctgcaaagctctggccatagtctcagtaactccttcacaattcctggagatcataagcagagccacatcaaaatatcttcaaactacgaaattcaaatccattttcagcaatttcagattcaaaatcataatcagagagccaaagtttgaagatttgaagtcagaattagtgagacatacccaagtgacctcgcttggcagcgacatgaaaagcgttcatgtcggatttggatctgatcttaactgtttccaaactagaaaacctaatcaagtaacgaaaaatgtcttcaagattctctgcggcggagatatagacggcggtctctccggcgtcgttttgcacagacataagctcagccacagcagaacacggcgatgactcatcgattagctcatctccggttaaattgtcaactaactgttgaagttgactaagatctcctgatcgaacagaggaaaagaaagcttggtgagtaagaaacttcatctgcttcatctccatctctgtaaagctctgtcctttctctctctaaaccaaaaaaagttatcaactttacacagacccagtactctctagctctatctctagaaagctcagccaaaacccatcaacatgaacagattcgatctccaaaaagtcttcttctttatttttagttatgctttgcaatgaaattgggattcatgtgaaaccatgtttggttcttttgctttaaaaaaagaacaaaattctttaaggtttttgcttttgttggagagttgacactaaaaactaaaaagatgataaaatgggaatcttttttttcttcaatcaaaacctgaatggtctctaaatttctcctctcaataattcgtttctctgtattttaaaatgtattttttttccaattttgacgagacagcaacattatttctcgaaacaaattatttgtctttttaaaataatttatgtactatatagtctatagataacgtatatggaccgttgacagttggaattatattttaattctggaaatatttaaaatgacatgttattttcatgtaaatatatttttcttttaccgttttagatttattatttattgcaaattatgatttatgagaaccgttatatagccgattctattatgggtaatttgtttcgatctttattagatccacgaaagacgacactttcttctccgtcttcatgcttttgatggacaccttgaaagatcttcaaatcctggcaaacagttataattgtacatcgttcgagatctcttgcacacttatctccattatctgctaataaatcacagtatttgggacttgaacctcaatttctttgtgtataagtattaatagaactttccgccaaaaaggcttccactgtaaatatatcattactaatatagaaaaaactttaaaaaaataaaaataaaagagtgaaaccgtccaagcccaagtacagcccaattatttatatattaaaaaatgggtttatataatacgtggcttctgttttgtaaaaagacatgttattatgggcttgaagcccattatatttttaataactagcaaactaaacggtcctttttgtgttttgtgagagctacttcatgttgacgtcaataatgcaccgtcaaagtctccgtgacggaaccaccaccgacccaaatgaccggcatcaccgtcaacttcttcgtcaccattagctttcatataagtctaaattcattttattgctacgttgatagtccttttttgtatataacgttttaacattttatcgatagtttcagaaaattaagaataccataatgagtatgaactatgattcttatggtttattttagatatatagaagacatagctaatcagttctttgacagtaatacaaaaatgcctaaaatttttatggattaagagagaaagaaataaaattgacaaacaaaaaaaaagctacattccagaaaaggattaggttgcaagtgagacacgtcgaaagatagtgactgtaatatttggattttatccacaaaccaaccaaagtaaaacaaaattcaattaatttaaattatcatattgtggaaatttaagtgttctagaaaaaaacatataaacaatgactttatcttacattaaatatgtataagtaaactttgaaaaagatgtgcccttcaaagtcttcgaaatcctacttggatccaatacatagaaactatttataaagtatattatatacacagttttgtatttttgctacaaatcatttacagttttatataagaataatgtgaaacaaaaatttatttgtcaaattatcaattaattactagttagaaataataacattaaatacattagaaaatctatagtttgatatttattggaaaatatatattaattacatgcactgagggtcctttgttatatactttattagtatatatctgacgtcaataatttttttttcttattagttgggtcccatatatttgtataaacttgactctaaccattgtttatttactaatgtaatcttcaaatcagatataaaataaatgttgggtttggttgatccaacaaaattgcccccacatttgtctacggagagtccatcaggtcacatgggtggcactaattgaatctcagttcaatatatatataaacagaagtatttttcattatggtattataagtgttggaagattaccatacatttgaaataaacatgtccataattagacagaaaattgaaccttttgtataagtgtattgatgaggcaataaaagtccaactacacatctcaaggtaacgattggttggaattttttttatccatgtataacgacaaaaaaacataaacagaaacaaaacaaaaatcaagaaacctacgtccacaactctatctttggtctgaaatctgaattctgaaaactataatcaactatactggtctaatcgtctatgattggtagagtttttccaaacctaatgataggacacacgaattatcgcttgggatcatgctaagcataaccttttctttattaatttaacatcacaatatcattattagcataacatttctttggttaaaactaatatcatcaacgttttcacggtcattgcataggttttagaagaaccattcaagggtttaagaaataatgatcttaattaacactagtagacgatcaaacaaaaacaaccacgatctaaactcacacgcgagcaaacgaattcgttctcaactatgaatgaaaactcaattcgtatataactaggatccataagacgaccataacaatgatttattatttttctttctttttggttaattctgatttattatcttcaacgctttccttaagcaatgtacaatattgttttggaccacaattgttggatttgtcttggtttcaatcatagctactagtatagacgtcctaaattgtaagaaaacacctctattctacaccccgaagaatattatggaacttcatttggaatattctttatttttggtagggtggaggaaacaattgcctttcaccatttattagattaaattacaaaaaatttataaacaaactcgacgtctgtttccactgcgtcctgtaacataatcaaatggactacatcagcgcaaaaatcaaatgtatgaaaacctaactacaaataaaacgtatagtttgctaattcgtctgttagacgattagtctccctatacacatgagaaattcggactaaccaattctttgaaaaataactatgacacaaacatatctcaaaagctatcggatatgcctcacttatccctgactgaagaaatcctactatcaactctgaatctacctctaaatccactttcctaagcctctctcccaaacaatcagcagaccatagtaaattccccacaactccattaaaagtgcctagcatttgtcaatatgtagggcaaatccgcctacccaataactatccccatctcagatcaaattatattctgaaataatacttaaaattatagttttttttaacaccaaaacttaaaattacactaaaaagtaatttttctaatcaaatatcggaagaaaaaatagataatatttgaaatccattaattatattgcatttttataacaattataatttgtcaattagtgataaatgaaaaaaaaagagaaagagagagagttgataacttgcataatgtattattagagagggaaagagagcatgtggtgtccgaccatttcaactctcacgacttgctccggtcttcctctgatgccgacatcttctttctttttctttttcttctcttaaatttatagactgtgggttctagtcctataattaatatctcaccaatattttagtttaacatttttgatatagctactaactttttaaaccgaaattcaaactaaggtcacaaatctacagccgatcgatgcataaactttgtagtggttaagaaaacaaatccagtaaaaggtcgatgcaaagttcgatccaccaaccgaaagaaatggttatatttaactcgtgtaaccaattttctacgctttttcatgtcacgttaaattatatattaactgtttatatatagacattacattcaagattcaacgtcgttttcataatagtacgtaatataaatatagtatgtgagagggagaggggttaggtttaggttttgtgagtaaaatattatattttcatacattttagcttctcagtctactactcaacaatgaattaaaatcgatgtttttgaagcaactaaaattcaaatcaaattctagaaagtcgttttccttcttctcgatattcttatggttttctaatttaaaatgcatggaatcgtagaaagtattccaaaattcaatgttaattctagaagaaaactttaatcggcaaattaaaattctttaataaatcgttagttttctagagactgcaaataatatttctagaagaagaataaaagaaactcataaagtcataataaacaaagccgaatccaaatatatattttacataacaactacaccaaattattttggaagaacatttatatgaagtatacttattagggaaaaaacaattatgcttatttcatatacgtcgatgttccaaatgtttttattgctttatatggttagatattttatgaatttctatgtaaacttttaattgggtttttaaatatacatctctagctatattgttgcatgtaaacaaaatgatgtttttaattaaagtgtgggaaaaaacagaagagaaataagtaatttctttttagaagaggagtataaaacatatatgcatatggggttaattttccaacatgataagatagcatcaaaaattactataacgaaaaaagaactaaagatacgaaatagcaacaaaaatactaaaaatatgaaaaaataaaattaccataaaaactagtgtacacaaaggtcaaaatcttatttacatttgtaattaggatctatatttcaaaaaattgaacatggaccataattgtttttgctatttttgagctggcctgtttttgctattggtaaatggtggtttagttaattattgcataacaaattgaacttgcatctttaagttcggtgcgaaaacttagattattcagaaatatgtttttttttaaatcgaaaataaaaataaattaattataatgccatattgtcgatctataatcccatgataccctcgtggtcgtgtctatttcctaatttttaggaaattattctcatatccataatttcagccaaaaataagaattcaattatattttgctaaatattccaacaaacaaatgtgtttgtaataaagtcgcatggaatccatatatattagggcaagcaaaaaatgagaatgatattaatctttataaaaaaaagacatcaaatgatcattgattaatgattattaagactattttctgtccatgtaaatttgtaagcgagtgtcttaatgtctttgtggctgagagaaacatattgtgcggcggtatctctatctctgaccaattatattccatttatggttgtcatagtttatccagagaagtagcttcgaatttgattatgtttttcgtattttgtagacacacaatttaaccggtaacaaaatatttcggcgtgtgttttggattggcatattagaattttcgcatagctataaagttttgaatagtattacacttttagttatccatcaccaagtggggctcttctaatctacttgccatttgtagtaacataatttaatgatttgatgtgcgtcgtttgtcttatatttagcctgatattgtgaaaaagaataaattattcctcaaacttatctatatatatagcaaaccaatataatattatatcgttaaaaattgttatatagacgattaataagcttaatgaatatgattaattgaaactttgacaattttgaattatatatttttagttattattagaacacagaagaaccatgatgcgtaatataggtcattattatgcgttaagtttcatgtgtcgtgatgaaagaaaatcctttttgggtgactaaagaggaaagattctaaatcggtggctaaaatgtaattatgatggttgaaccattaaaacaattcatatcgacacatttgcaggaaggtttcatattcgataattctaacttcttctttcttatgcacccgattagtctaacttacaataatagttttatctagaaattcattgaacctttatggtgcatttagtttatatgtctatgttattatacctactcaaccatgaagattgtttgttttcgtatttttctacgatctgatttgacaattagacttacaaaattatcaactaaatagaagctttgttcaaaaaatcggatagagtccgcagcgattttgtccaaatcagaaagattaatcgtttatccgatttttgtccgtatagatccgctagacccgcttaatatatatatatatatatatatatatatatatatataagttttatattaaaatatccaacttatattcgtaatttatatgaaaaattataaatttgaacctaaaaccttattttcatatgtctaatattattttaaaaataatattatataaatttcttaattataatggattaatatgttttaaaaatattaaacaaccctaaaactaatccacgattaatccccctataatctcctattttcctgctagacgctatgtccactctcaccacccgagtagcacctagcgattttttgaacaaggaatagaagtaatgagaacattaaattgtttatcaatttgaagtaaccacattaggttttagtttaagtgaactaaaggcatcggtaggtcctatttttgtgtcgtattgtatgttccatgcatgatgcatggggctatatatatcgtagtcaaacaagaacctaatataatcaaattcgacccatgaggttggtatataatagggagcaaaaatatgaatcttcttggattaaaaaccggtccaaaccacgccttatacattaggagttttatattgaataaaacgatcggattacttgtaatatatgcaacgactgcatcactctcaggtaagaaaaaaacgtagatacatcgaacatacatcaaacgcagacgcgttcactaaccgcgattcaaacacgcacttgatcgatctaggacataggttaggaggcgtcgactcacgtgaccatgtctcttccaaagtcaacataaatgtgccgcgtaaggatagagactacttttgttgttgttttactacgtttctaattttatactaaattttacgtgtttaattattaacctaatggctaaatgtctctagttattaaccaattaaaccctacaaatcgagagaccacgaaacgacagagaaaccccttaaacactttgacagagacaacgtccaattattaattacgttgaattattggcctttatgccttaaattgattctcttactacttcttaattttgttgacctaccaatatatatttacaaagttgtatcatcgggcgtttaatgttgaaacccatgctactattattaatctgcactaccacgtaaattttgcagtaagagctaatgaaacaaaaaaaaatactattgactaataagtaataaatgaccatagctcaatttgtttactaaatacctcaacttgtagcattattctatagagtatcatatagtgttaaaagtgtactgatgcacgcaaatatgtcgttaagttaaatgatacacagaaaaattgctccacacttgcaatacgaagtgttttttaattataatccaaaattttgttggtttgtcctcattatttaatatctaacacttgttatttgggtctacacccgaaatttacaaactaatcgaattatttcccatatgaattataaaatatatatgatggaaataagcaattaagcatgatcaaatcatcatcatatttggatttattaagggatagacataaactttaaactaaatttccgagtatataaaacactaaagtataaaatcagatccgtgtgctgaaattattatttgtgaaacaaaattgatattttaatgaataatgatgtaataaaggttttttttttttgttaaagatgtaataaaggttatgagatgagatcattgataatttgataaacatatgtctacaatatttaacataaattaactaaaaatggatatgatagagaagggataaatttataatttatatttacgaaatgagataaatttagacttgtagctatgcttattggtacttaaaattaacatacatttttcttttaaaaaaccccaacattagctttagcttctcgaccaatgatgaaaattccaagaaaagaaagaaacattcataattgtttttttttcaaacaaaaaaaaagagcggccgttttattataaaaagaagataagctattggaggttgatacaacgctttttgtctcatctccttcttcttctccttctcaaatcttttttttcaggcgtaacgaatcgaatcataaacacttacgcagaaacaaaaactaaactttggatcttttaaccgaccatagagattcgtgggttcttcttagtttcgacagattcttgatccgttttagttgttacgctcatctttgcttttatacatcagacccttctcttctcttccttctttatctaagaaacattagggttctttgaaatcttgctaaaaaaaatgggtgttgagaaaatggtgtgtttagcttctcgtacgggtcgtcagtttcagagatacaacaaaggtcgtcgtcaagtcgttgggtacgttcttcttcatatacatacatatagatctgatctcacatattttacccaaaaaagttgagtttctaaaatggtaaatttttggggaaattttgcagatgtgttccttacagattcaagctatctaatgatggtaaaataagtgatgaagtagaagttcttgttatctcttcccaaaaaggccacgccttaatgttccccaaggtattataatcatcttcttataaatattaaagtttgatgagctagatttgaaatttcatagatattgattgtgattttttacaaataaatttcagggtggttgggagcttgatgaatctgtagaagaagctgcatcaagagaatgtcttgaagaagctggagttcttggcaacgttgaggtattttaaagttaaaatctttttgttgttatgttttgtttgatatttgttgtattgttttgttcttaattttgtttggttttgattatttcagcaccaacttggaaaatgggattttttaagcaaaagcagaggaacatactatgaaggactaatgttccctatgcttgttacagaacaacttgagctttggcctgaacaacatgttaggcaaagaatctgggtcagtagctaaataaaactatgttttctttagatattttgtaacatatctagtgttttactgattgatatgaatttattggggacaacagatgaatgtaaccgaagcaagagaagcttgtagagattggtggatgaaagaagcattagatgttttggttgagagactttcatcaccaatgaatcaaccaaaggaagagaagactatgtcaatctctattgaaacaatgtgttgatgatgaagctgatgattgctaaattgctgattgttgatgggagtttttatgagctaatatggatctctgtaggtattaaatagatgggtctcaattagttattgagacggctaaaaaaatctatttcgaaaagccgatgcagagagcatggacaaagaaaaagatggtagagttttaagttttggatcagaaagattaacatcatgtgatttaagaagtcttgtgtttgtgtttataatgtttctgcaagaacttcttaagatatgattaagagggaagatgataaacttagagtgcaagcaaaacctgtataattgtgtttccctctgtttatttttcctctctctttgaatttgcaatggagacatttgatttcatcatgatgcttttgtgattcagagatacttaaattatgcaagtagatgatacgtggcgtgatgtgattgatttacaagaaacaaagcaagaataagttactctaatcatatgaaaaaaaaaacatgtcattttcaaaatttattatgaaaatataaaataatgttgatgacgagtcatcatcatcaaaattggctttatcttttggaaaatctttggttcacattttgagtaacttgttttttcccagctacctacctattcattgtcaccaaccaacatcttagccatgtagttagatggtattaattactattattatcataacaagattgtttgcttaaaaaaaaaaacttaaggtcgtaataaaaaaaaaacaatatttggtagtgttgattttagtcccattaattttgggaaaatgtgaaaaatccatgacttaaacttaactacataggtttgcccaaataaataaaaacttaactctatttctggaagcctctttggtctagtggttgacaaagagttttgattaattcttatgttttattagttcatttgaagaattaaattagttatatttttattttcattttaatagcagctaatttgttctttttactaatataacatatgtaaagaagtaatttatcacatttttctaataaatatttttaaaattttgtatattgaattatttatgtttctgttcgttaaagctttttcgttactagtcatttttaatattcattcacatatttgctttaattttatcaaattgatgagttttgaataaaatttggattgtgccatgtcgtgagtctgtgatcagctccatttgggtgaggcttgttatttaaatttgggcatattcacatgaatcaaagtcatataaagttttcttatttatttcccaaacaatgaatcaacagagaaatgtttttaaattacataggattaaacgatgccattcgctggtgggctgtcgtggcctcttcctctatgacttggcccactatcgtttatggattctactgtcgcctccattccaaaatacatttcggctatcacaaaaagattttgtacgtagtgagaaatatacaattaattataatattcatatgctaccttcaaattaaagttgaaaaagaagagatgaacccattgtatagattggggatactttaaatctttgaaagaaaaaaatataaattgtgttttgaataataacataagcattaataataagaaaatgtgaattaggttcttatgaggtaagatcgtattaccaggggaaatacggctaggaacagtatatgaaatgtcatctttcatcgccatattaaggttctggttcatcatttccgccgattgcaaccttataccttcaacagaagtttcaaaatgcattgaaaacaccaaaaatatggtacaaatggtgaaaacagttgaacaattcatagtgctagttttaaggtcaaagattaaaattgttgagttgtattgatgaaaaaattagtatagatcaaattgggttactactatgttatataatggattaaaaatactttcttctaattggagttaaattttgatttatctatttttggacaataattttaggtattaaattttttattttattttatttatttgccaaagattgcaagtagtagaattaattgatttgattaagtaaatatgacagctagatacactctttgcatgtaattaaaaattaaaaaattgaaattttaatttattacaagattttgatatcaaccacttttagagaaagagagtaaccaggcaatattaggaaaatataaaattaatcaagaaaaatagacatgaaaaacaaactactccaatctttttgtttagccaataaagagattaattaagctaatatcttactaaaaaagagtttatatattattaattttataacttagaaaatttctaatctattatgcaaaaagttatttctaattaataagattgattctactaattttgataatagatatttgattcaaatataatgaaaaataaaaatgacctctagcaatttttaaatttttggtaacaaaatactaacaattttcttttctggcatagtttaaattaactttagatagtttgaaataatcttaaggatcaaaagataatagttacaatctatgaaaaaattgttcttgcaatgtaacaaagatcacctaaatcaaaaatgccctcgagttgtccatagatgtgtgtaaaattaacttaacaaaactaatcagtgcatgattatattttttttagtcggccaatttatccattagataatgaaagtgtgtacagaaatacatttaacagacccaagagactataactccaattggtaacattacataatagcataataatataaattgccaaataaaaatttgtaaaatgaaaaattgtagaataaaattatttttaaaatatgttgattgcataaattttgtagaataatactgcttttgttgagcctctcttgctaatgtatttgccattacatttggttctctacgactatatatattatagtaacggttcttggccaaagctaagatattatttaggcagtcctgaatttcccaatttcccggtgtaggatgatgacatgatgtgcgcatataccaactacttttaacaaaaataaaattacactaggtgaatactcacactacgtataggttgttattttaaaaattatttaaaaataattatgtttaactattttgattgctaatttatgttttttccgtatatgttattatgtagttaataaagttatatttattttatgtaattatatttgtagagttagattcacttttgattcacatatcaattatattttttatgtataaatctttttatctctatacccaaaattctaatctttttttaactatcatgaattacttacatcaacaatatatgatacaatggtatgcaattatgttacttatttagtttgaaagttgtctaatttgattctaagcaaacaatttattgtttcatgtattctctcttaatctaatatcccaatcacatcatgataaactcatggctaagtattagattgacataaaataaataacatatgtataactaactactcatttgcattaaaagttttcacgtgaaagaaaaaaaagaaagcaaaaattaaacagtcttttaagttaatacttttaggtttctctctttacatttgcatttagctatattggagagaatgtcgtatattaaattttttggtatatctaacgtctcaaaagaccattactttaaaaaacatgcatgttattattaatgttactaatttatcataaagtacaaaaagaccatgataatatcatgtagaccaaaaaatgtaataataagaaaaattaagttaaaattactaaattaaaaaaggttaagtaccaggtaagttgcaatacccaaaagtttctaaccattatcaaatactgactattaaaaaaaatagcaaaataagaaaagtaaaatgaaaatagtatttgatatattaacataattttttatatttttttcttttaagtgaagatattttgttaaaaataagattaatgaatgattcaatgcaatgttaaacttttaaattttatcaccaagttttattatttttctaataatattaatttaggataacatgtgacactcattagtgtgatgatgtgtcactcatatgaagaaagttagccaactttcatatatatgattaccaaataaataattttgacatatagtatatcgattaccaaaccatataactgataaacagatgataaaaatacaatataatcaaagtgtttcataatcatatagtaacgcaccaatcattaaaaaaaaaaaaaagttaaacaccaagcataaaaaaaagtcgcgacgttctcattctttctcgaatcataccacagagagagagagaacaaaaagaagcaatcgtcgaaagtcatgttcgctacaaaaacagttctctttatcgccgtcgtgtcacttctcggaacgttttcatccgccgctgtcgatacttttatctacggtggttgctcacaagaaaagtactttccgggatcgccttacgagtcaaacgttaactctctactcacctcgttcgttagctcagcttctctctacacatacaacaacttcaccaccaacggaatctccggcgacagttcctccgtctacggtttgtaccagtgtcgcggtgatctctcctccggctcgggagattgtgcaagatgcgtcgcgcgagcagtaagccgtctagggagtctctgcgccatggcaagcggtggcgcgttgcagctcgaaggctgtttcgttaaatacgacaacacgacgttcctcggtgttgaggataagacggtggtggttcgacgttgtggaccaccggttggttataactcggacgagatgactcgtagagactcggtggtgggttctttagcggcgagtagcggtggttcatacagagtaggagtgtcgggggaactgcaaggtgtggcgcagtgcaccggagatcttagtgcgactgagtgtcaagactgtttgatggaagcgatcggacggctgagaacggattgcggaggagctgcttggggtgacgtgtacttagcaaagtgctacgcgcgttactctgcgcgtggaggtcactctagagccaacggctatggtaatgtcttctttgctccgttgctttttatttcttttataaagatttttatttgattttaaagtttttaattaagggaaaaacccgaaaaaatctccggctaattttagtttgtctgtttaatacctctattatttaattttctcaaaaaatatctaaattaatttttatatctttttaaaactttcgttttattaaattttgttaaaattagatattcaaattaacagccgttaacagtggtaactgaatcaataactgcagtaaaaacttaactgtacagtatttactatttatatatattttattatcgaatagttacgaacgtattgtcttagtcatgtggttatgtgagatttttattttcaagatttatttttttcgtttattttctccatcttctttgcatagaatttacaatttatgcatataatatttttgataattgtattgttaaaaatgtgttatttttgggatgtaattaggtgggaatcgtaataacaatgatgacgatgagatagagaaaacacttgcaatcatagttggcttaattgctggagttacgttactcgtcgtatttctctcttttatggcaaaatcgtgcgagagaggtaaaggtaaatgaaatgacccatccctaattaatcgaacattatcatcaaatattgttatgattaacggatcaatatgtaattaatggagcccaaagataaggcactatgatccgactttttttgttgttgttgttgtttatatcatctattaatgtttttgtttttaatatatcaggtgggaagtaaataacgttatgggacttttgacttgtatcatcaatttatggttttaaaaaagaatcaaatgcgtaaaggagaaagaaaagcgaagagattcttcatattctccactaaaatcctaaaggatgtttcttttttgacccactttaattgaagttttactatttttcaaatgtatagaaaactcacgccgtttagatttgtgatcgtatctttacgtaagaacatttaaaagtggcgcatatgcaatttatctttgatatgtatttctaattatcataatcacttaacgttgtagtttaaaggaattattgttgattttgtgttactgtttgtgacaaaacaatgtatatatatgttctatgaatttaaagccaaagttagctatacattttcttatttccagtatataaatagaattttgttctttctaaactattactaccttcaatttctctcttagatttttcatttgcaaaacgcatcggtgtatcatttctactatatatcaatcaaagaagtctattcatgttgtataactaagttttgaaatcccttttctaaattcatataatcttaactcgttacaacgaattctcgcatccacgatgatttaaagtaaaataatgtcaaatggtaggtatatatttgattgaattagatactaatatatcatactaaagatatgaatacgtctttagtaagtagaactttataaagtgttcaaatttatatcattatgtttcatacaaaagtaaggggggatacaagcataattgcctaattggtggaacaatcggcttacgtgacacaattctctatcatcaattattcgccttatgttctatattagatttgcccaaaaaaataaaacttgttctcaagtagattaaaatttgtttgaaatgttttaattattttgtatttcttatcattttatgcaatcgatattatcctaggccaaatagatgcagctacactaataaaacaatttgtgtgtggatcatttgattttaagtttcctttatagtttacgtttaaaaaaaaaaaaaaaagttgctaaaattatgtgttagcggcaatgtggcactgcgttttcgatccaatgttaaagtagccatactggctaatttaactacattgtaaaaatgaaataaaattcgattttaaacatcgagtaaaaaaattaccaagaaatgaaagaatatagttagactcaacatcgacaccaacaaaacatgttaaaggagaaaaaaagtattgtctactatagagattacacatgcgattgtagacgctatcgtacataatatattaaagaacttcttaagacaatgacgatgatgattcagaacgctgataccaagggaaagttgttatagtgctatcgcgggtggaaatcacagcttctcatccgggaatggcaccggtcccagtgtcaatatcatggattctgctaaataggcaactgacaaccagtcgtatgcctatttcattgaggcttcttcttttcgactggagcgtcgattgaaaaattgggattgttcctcgcacaaggtggagaaactaataaatttggtgactgcaacgaagaggtgtgagtgttgtgtgatgcgcggggccatgagggaggaagcaatattttcatcagcccgagaatatgatcaccacacagcttctagggctttttcaagaaccgtcggtaccattgtcatctttgttggtgtctttggattcaagacttctatgtcttacatgtgaaacttgtacaaagagggtgtcacagcctcccattgaataacaagttgcggctcaaacgcaagccaaagagacgacatatgcaattaagacccagctgagtaacgtcaagaaaaactttctaaagactagttcatgatcctaatataaaatattacttcttctgtttcaaattagttgtgggttaaggtatttacacacatattaaaaaattatcaaaattttatttaatctacctcttttatataacagtatcattaattataaccaatagaaaaatatagggttaaatataattggtttaaaaaatattaaatacatttattatttgcatagaaagttgaaaacaatacttattttgaaaaaaaataaaaactcttaaaactacatttatatagaaacagaggaagtactaaatttatcacaaaatgcaaaaaaacaatctcactaagaggcaatgttaaatcatacaatccaaaacaaggcgtctttgttgttgagcatatatccacgactgtcacatatgccaaaagaccaatgtctttaaaatgtttgacaatttatgaatatattgcatacttggcaatattattatatccacgactgttacatatgccaaaagaccaatgtctttaaaatgtttgacaatttatgaatttattgcatatttggttcaactttatgctaatttttactaaactgtcccttgaccgacttcaaaatatatgagtacttctcttctattctttccaaaaagaacaacttatacattctatatatgtttgcccaaaaaagaaaaatacattctagatatgtatgtttatctacatagtctcgatttttatatagattattttctgatttttgctgatgttttatataaaacaacagagaggtaaggaacaaaactatattttccaaagttggacgagttcattcccatcatcatcaaccaaaaagagtgataaacttcggatacaattttattaatatcttatatatttattttttgaattagtttcgtaagaccacactccaaagattcatgtcttttcatataaccagttagaaattgagatctttgtacttacatttttatttgatcaatcaaatcttcttgataactctaaattgttgtgcaatggtctctcctttattgcaatgttacatattcctagtctctattatggattaggtttataccaaaagttaccaattgcaaacaaataataaatcaaagaaaatgtttgaaacataggaacaagtaatgcatcataaaacctaaggctaacttcaaatctctgtgatgatttcactctgtttcataatcttcctcgtatggtaatcgtcgacataaatgacaggacctctcacgcttaagccacttaaaggacggcggattcagttaggttttaggttttgattttgattgaagatcgaagaagaagaagagacatgcaaggaggaagggggaaataagagaagaaacaaatcactcaccaatggagaagagaaatcgccaaatcggaatgatattgctgtcgttgttgtggtcggagaagatgatttcgagatcggggttttgggttttggttttcgcttaatatcgaaaaagaagaagaacaaaagtgaccgcaaaaaaacctagtacttatttatagtctctttgtaacttcattttgagttttatttcacttaattcataattcttttttcttagttttttttaaggaaaatatgcttttaactttgattaaagataattagtctttttacttaaaaatagagtcattctagttaaccattggtaagaggagtcattctatttatttttgttaaaattatagtcaatttaagcaaatttcagttaaatatcataaaatgcaaacaaacaatctcgcgaagagctatgttaaatcatacaatctaaaacaaggcatctttgtttttgagcatatatccacgattgtcacatatgccaaaagaccaatgtctttaaaatgtttgacaattaatgaatttaatgcacatttagttcaagtttatgccaatttatactaacttcaaaattcatatatgaatacttctcttccattctttccaaaaagaacaacttatacattctagatatgtatgtctatctacatagtcttgatttttatatatattatttttctgatttttgctaatgttttagataaattaaagaagtaaggaacaaaactacattttccaaagttggacgagttcattcccatcatcatcaaccaaaaagagtgataaactttaaatacaatttcatttatatcttcttatttttttcctgcatacagaaaaatatatcagataaagaaaaacctttttttttgtggtcttagatactattattcttaaataaaactccaaaaaataaagtcaaattagatatgtagtgcaaaggcttgttgtttattaactttacttgggccaatatgagattacccaaagaaacatacttggtggtattaataattacaaggcttttagcaaagatgtatatctaagcgcattgaatatacaatgatttggcccaaaaggaccattaatcaaaattatggcgcactgaatatacaatgatttggcccaaaaggcccattaatcaaaattattgcgcaacgaggtcaattttttttttggcttaattgcgaagagaagcaaaacagaacaaacacaaaagtcttcgacgaccaaagaacaagatcatcctctgatttttcagacacatatttgtaatttataaagtttgtagctttttccttagcttgagattacacgaagaagaagaagatggatgacgttaaagataagctaaagggattcatgaaaaaagtcaatctctcttcttcttccggcaaattcaaaggccaaggtcgggttctcggatcttcttcttcttcctctgcaccacccgttaacccgattcagaaccggtttaactcttcccaagctcccaatccgactcctagacccaaacccaatccaaatccgttgcctgagaaacccttatcctcctccgatcagaagattagtgggtcaacgagaaacccggatcatgacccggttcgtgctccacaagatgggtttgacccgtacggtgctttcataacgtcttcgaacagatctcagaacggatattctctgagcatgttcgagtgtccgatttgtaaaaatccattcacgtcagaggaagaagtctctgttcatgtcgagagctgtcttggggacactaatggagacgaatcttcatttgagaaggataataatgataacgataaatccgaaatggagaaacttgtggttgtgtatctctctgggaagccaagtgagagctctattgatgttttgcttaggttgtttaagaacatagtgaaagaacctgagaatgctaagtttagaaaagttagaatgagtaatgctaagattaaagaagctattggtgatgttgctggaggtgtcgagcttcttgagttggttggttttgaattgaaagaggaaaatgatgagatttgggctgttatggatgttcctagtgaagaacaatctatattgatcaataaagttgtcggatatctagaaaagagaaagacagagagttcaggatcttcagctcaggttatggaacctgtggctccaaagaagattgatagagaggtatagttctttgcttgatcacatttttggtgatgaatatgtttagtttgtgacttgttcttagaatggttgtttcttggttcagattcgtgtctttttctcggtttctgaaaacgtagcatcgagaatagaggtacctgattcgttctatagtctctcggcggatgaaataaagagagaagcggatttacggaggaaaaagattgcggagtcacagcttttgattccaagatcttataaggagaaacaagcgaaagcagctagaaagagatacaaaagaagtatgataagagtgcagtttcctgacggagttgtgcttcaaggtgtgtttgctccatgggaacctacttttgctctctatgaggttaacatctgaattctctttgggttttactcaatgaaggccaaagtttttgaaatttctgtggtttttgttttcttctcagtttgtgagctctgctttgaaagaaccaagtttgcagtttgagcttctggatcctgtgctggttaaacggcgtgtgattccacatactccagccccgggacagaaaccgataacgttagaggacgaagagcttgttccgtcagcgctcatcaggttcagaccgatcgaaacagactctctcgtctttacaggactccgcaatgaactcctggagatcagtgaaccactctcgtgatcatttgtgttccactgatgatttagcttgagcccatgaaataagtttacaaatttaggtttctctcttatatggtgtgatttgatgatgatttgtgtttgtgattcgagcacattttataggtttataagaaatttgtgtcatttgcacaataagaagaatcataaatttgaaggtccttcatttgttaatactataacaaaacaacaaaatagatcattatgtctctatacgacaaaatagatcataaatttgaaggtccttcatttgttaggaacttatgtctctatacgacaaaatcaggaatccatggattgagccgttcacttgttccgatttcttttcttgcttccctttgtcttttcttcagatgaataatctttagagaaagaaaaaaaaaaacttacactctataatcgggagaagggtattttcataccgtactatattctgagtgtattttcatacccagacaaatttgtacctaaatttatttgtttgcgaacacctggtttataacgtgtctaaaacgacgtcgtttattactcatcgaagcaatgaatctagaacatcatcttttctagattactactcatcaatctcaagcatgagacctgtatcacataaatctgcatagagagatctcacaggcgagactgtgttcttaaaggaaagctgtaaacgagtttgttacagatcaaaacttgtgtaatttgaacaataataacaatcaaatttgaagattcttcatttccaaaatcatgttactataacaaaacaacaaaaacaaaacataagtaaacttataggacaagatcagaaatccatggaatcagtctttccttttttcttattccttttcttgcttccattagtgttagtcttcttcttcggtttctcttccaccggtggctgttgactcagcaagtgctgaaatatcgaaccaactggatcagcttgaaaagctggatggtctagaaccttattcaatctctccccttctgtcaatctaaacaacacacaaagacacaatcctttcagatgaaaatcgcaagaaacaacaacaaaggaaacggagacttacacgagcttttgtcgccttttacagttcattttcagctcgggtgcaggaagagctgatttctgcagagcattgaactcgggaagaaactccgacaggttggtgagatcatacgcctttagcttcttttgtcggctgcggattttcttcttctgattaaaccgtaattagagttaccctcattagcaaatcatatgtatatagaaaaagttcaaagctttcacaatagcaaccaactccattgtagaagtagcaaccaacaactacaagtcctgaacaaaacaatggactcaaattgcaacgttcttaacaagttctaacaaagattgatactttctctaatcatagagaagtgtttaccttgccaatctccttttggacagacaaagaagtaactgtatctttgacctctgcattcacaaacaaagtttcagacacattgcaatttgatagcttagcagaacaaattttcaaattcgagacaaatttgatagcttacttgtgtaaaattgaagcttcttctcaaacttcttatcagacttcgttgtcacttccgatctgagaaataacgtccgaaatcaaatctcaaacacaaaaccagtcaagaacaaaacaatctgaacttcagatgaataactgttcgaagaagataagagaagccttaccctttgcttggtttgcccattctgtgtcttcaaatcttcaacgatttcaaactcgggttaataatggcgaatgctctgatcgaacaagatttagggtttttgattgaacaaagagagtaaaagtttgaatgcctttgtaaattcggatcttatgacccgacccggaaaatgaaatttgtttatatcagtaatgtttgggcctagccagacttatatctttcaacccattatgagcccaaaggttgttaaataaatacgtcattgttaaataattacgtcattgttttcgcacatactactaaacacaaattaatgatcattgcattttgttgactaaagataaacaaacttatatgtatattttttaaaatatctgaaagttcaggctcaaaaactctatattttttaaaggcggcgaaacttacaccagattaaattcatctttcttaaagaaaaaaatttttccaatatgcttcgaacacaacaattccacctaaaaacattatcattagaccaacaataagttattatttttcttttttctttttgacgtagtttggctttgacaaacaaacagaaattgaatgattactcgtgtggtatataaatagttgagactcaaaattaaaaagaaacaacgagttcttttaattgttgtttttttagatgaccgttgaactgaatcaagtgtgattcactgccacacaattaaaacattgggcattggctataaaattcaccaagaaaatctatttaccataaatttgaagaaacaaaaaaaaaaaaaatcctagaacatttatttaaaggttagttttaaacgaaaataaaagaattgtttttccaccgaaaaataaattattaatatttagtggtacgatacatcttttcagcaaaaaaataaaaaaaaattagaaacccaacttttagcctttaggcttgaagttatatatattactcttttgaagcgaactgattcttaatttttcactttctatttctctatatctatttttttatagatatatattttgtcttggttggattttgttctcgtgggttacttacttgagagaacctcgagacctgtcttgtctttatgcttcagaagcaaatcaaagcatctctccaagatttgaagctccatctatggctgcccttcttctccttttccttttcctcttcgcaagctctgctctctctcaaggtaaacaatttctgaaatttcttgacttgaatctttaaatcagctctctctaaaggttgatttgtctatgtttcttctctcactctcacttgtggaatcttctttctacttttagtggttgaagtttgtctctttctttgtgtgttctttctacagaggatctatttctactaattagaaactgtgttgtttcatttgcttccttcattttgtaaatcttttgttaacaactccataaccatagatgagttctctttgtttcctattaatgcaaaaacaatttgatagatgtgttctttctgtgtattcttcatgtcattaagggttttacttttccccaagaaaagatgaagactttaattgaaaaatctgtttttttttaataaatattccaatgttcccattctttttaatggggaatgagaatctcaagatattgcatcccagctcagtagtagtactcagcaatctaactggaccaaactgtcctcggagctggttgaataccatacacttcattctaagggcattttcgacttttgcgcactaagccaatggcttctctttttgtgtttccacatacttagattttagattagtcctattgactctttgcatttgcatttggttttaatgcttattgagaattggaccgaccagttgacggattttcatgtgaattgtttcgttttaaatatgttatttcagattctttgatcggtgtgaatattggtactgaagtgacaaacatgccaagtccaacacaagtagtagcactcctcaaatcacagaacatcaaccgcgtccgcctctatgacgcagaccgctcaatgcttctcgcgtttgctcacaccggggttcaagttataatctcagtacctaacgaccagcttctcggtatcagccaatcaaatgcaaccgcagccaattgggtgactagaaatgtagctgcatattaccctgcgaccaacattaccacaattgctgtcggatcagaagtcctaaccagcctaacaaacgcagcttctgtccttgtctcagccctcaaatacatacaagctgctctcgtcacggccaatctcgaccgtcagatcaaagtatcgacaccgcactcttcaaccatcattcttgattctttccctccttcgcaagctttcttcaacaagacttgggatccagttattgtccctctcctcaaattcctacagtccacaggatcgccattgctgctcaacgtttacccgtatttcgactatgttcagtccaatggagttataccgcttgactacgcgcttttccagcctctccaagccaacaaagaagctgtagacgccaacacattgttacattacacaaacgtttttgatgcaatcgtagacgctgcttattttgcaatgtcttatcttaacttcaccaacattccaatcgtggtcacagaatctggatggccatctaaaggaggcccttctgagcacgacgcaacggtagagaatgcaaacacttacaatagcaatttgatccagcatgtgatcaacaagactggaacgccaaaacacccgggaactgcagttactacatacatctacgagctttacaacgaggatacgaggccaggaccggtatctgagaagaactgggggctgttttatacaaacgggactccggtttacacattgcgtttagcgggtgcaggggcgattctggcaaatgatactacaaaccagacattttgtatagcgaaggaaaaggttgatagaaagatgcttcaagcagctcttgactgggcttgcggtccagggaaggtcgattgctcggcactgatgcagggagagtcatgttatgaacccgacgatgtggttgcacattctacttatgcgtttaatgcttattaccagaagatgggaaaagcttcaggaagctgtgatttcaaaggagttgctacagtcaccaccactgatccaagtatgtgaatctctcaaacattatcattcacctctttgcaaagagtatacctatttgatctgtgtctgaaaatggggtttgtgttcttctgattgtctctgcaggtcgaggaacatgcgtgttccctggaaggtaacattcttattcttcttctcacaaaagattcaactttaaatatccaaacgaatcaagctcaacgcttttgcatcgacttctctacattttgcagtgcaaaaagcaatcagacacttggaaacaacacctcggcgttggccccctcagcgaactctacaacctctggatgtatcccaaagtactatcatcaccctcacgcatctttcggtgacttaacattactctcccttctactgatcattgccttagtattcttgtagaaactctgaaaagaacaacaactctcaattcttgtttctctaaattttaacttctttctttgcaacacttgagacaaaagagctcggtgggtttgttctctctgtgtctagttgtctacccagttttgttgatcatctccttttaacatggagttcattgagggtagcatgtaggttcggcttcaagatcatggatgattgtaactaatttcctgtgttgaaagcttgattctttcttttttatggctgaatatttcacaatccaagcttgtcatatacaaaatagacaaagttgcagacaacaaagtgtttgtttagatttgatagtcgacttcatatgggtttgtacctgccctatagtaacaagcttcacattcaaacgaaggccgagatgcagcatcagtgattgcaatctcatgtcgacgactactgtgattagtgcaatatggtttattgcagaatctgcacttgggaagcacaagccaacattcaagacacagaacatcatcattaccacacgctgcttcttgactctcagtatctgaaccaacaaggcacactgcgcactctgcacatctagggatacaaagccagcatccacggcacttgcgttgcttctggttcttcaaccaagaaaaacatgatattagtactaagaatcacaaaacactctcaatgatctttatctacagagttatacttacacatgattctcttgagcaagacggaatcatccttacttcatcgcatttgggacagacctcgaggtcaatcgttccctcggaagaaaggtaagtatacagtgctgagagatgttgtttggtaaagccattgacgccattgatgtgaagtgtctctagtttatgattgttcttagacaagctttcaacacattccatgattccttcaggagtcaatccagagcatccaggcacaattatctaagagaaaaaacgtttcagatagatctagggtttcatcaagagttaaatccatttatataccttagtgatgagaggattagcatccacaacacgacggagtcccttgttggtgaccataagacattgccggagaatcagagttttcagctttccggcggatttggaactgaactccgatagaatatcatcggttagacgagagctcaacggtggttcaataacgagttttgtccataacgcggtttcgtctctgatcgcgtctctgagagatcgcgaaacgcgaatcatagagagaagctcgaacagagaatgaagataaggaagaacgattaataaaacctcgtgaacggatctccattcttcttcttcttcttcttcaagctccgtcttcatattctcagcttctgaatttgctctcttttagtttttcttatcctttgtcattgatcagatgaatcaatgccactcgcattatcttacgaagaagccaaatgtttgaataatttgactcgtcgaaagctatttgggctgctttgctttgagcccaaattcccttgtggattataacacgttgggcctaaagcccatacataaattctgtaaactgaagaatgacaataactacaaatgatgcatgttcttttactcatagatttaaatccttctatttttcactttcagatccatttaaaatgatttattggttcatggatttaattgatttaacattccaaagtaaaatttgtgttattcgatctattatttaatattaaaaattgtaatcatttgttattttttcttttttttgtcatcagattttattgttttttttttggtcaaacaatcattagattttattcattcattgatttttaaatactagttaaaaaaaatcatgtggtattcatttaaggtgataatatatactatacagaaaatgttttggcttcatgaacaacttttgacttcattaacttttgttcacaatcaaatgattctagtttgcgattcaaatgaaaaatataacaaattgtaacatacacaaatttctcaaaaatcgattaaaacaaaattgaatctcaaacttgaatatttttagatttcaacaaataaatttaaattaaatttcttgtattatcatattgcagacaaaaaagaaaatcttaaattaataacttttgggggcatatccatagaaaaggaaaaaaaaaaaactgtctctgaaaaagagtctgaattcaaaaagaaaaagttatataatgcatgagaaattttgtttcaaaacctaaccacagcttttaaacaactcatgcatgattgtatcatctatttgctaccataattcacggcgttcgaacgtatgaagtggatatgaacgatagctggtcaataatttttctattttacttttttacttgaccacacaaattcaattctcagtaaaattaacattaataatccaatattcattcaaaatctaggctcattggttgagtaaggattcattaattttctacatcaagaggtctggtgttcgagtcccaaatgttgtgatttattagcagatttgtagattaatagaggcaagtttgcaggaaattttcaacgatgtacaattatactcgttcgcaaagaatctatgcagagaagatcattgaagatgtctatcatgaacatgaagaaagaggtgtcgtctatcgtggatctaataagggtcagaaaaacctatctgttataaaatcgtatatttaacagttctcataatttacaatcaataataaatctaagacggcaaaagaaaatcaataaaagtatcgttcgtttttctctactaattggtcgaggttgttatttaaaaaaaaaaaaaaaaaaggtagttaaattagttaactagatagagcttggagctacagtaacattaaagaataaatgttcccatgtggcatctatctttatgtcctatcctttttttatttttattttcttgtaaatttaactaatcgagtgtacattttgagccaatctcgccacgaattcctacaaagttaaaagtccgtaatcaattaaaatcatgattatgtatttgattttattttggttcttgaaaagttgactaaaccaatatggaccctcctcatagtcacagataatgttaaggaccgtcttctaaaagaaggcaacagaagtcgttacctccatctccatcacaattcgtaaccaacattcttcaaaagaccaaactaaaaatatttatatacatcaattggaaaatatatttaaccgtggataaaaggaaaattagtctatatataacgagtatgcgtgtgtatatacactacgtcttacgcaataacaatgagtcggctacctccccactatacatataagtcatcataaccctaaagtatttgctttagagagaaataccataatgcggagtttcctacgtctccttaaaaacatggttggtccaataccataagaagttaattccaaattgataatcttctaacaaaatgtccaacagtatacaaaaggtttataatttgttgatcataaggtttcatatacgatataagtgatttgcttgttatcaataaattaatgcgataccaagtgtcgttagcttaattggtaaagaccttaggcgaaacttagaagtcaccggttcgagtgacgtttgggacaaaactaatattacatactgtggtttcgggcatggggggattacgggcttcggccagaacctcctgaatttaaaaaaaaaaaaaaaaaaaaaaatttaatgcgatatagtcacgtaaacattcattggtattagattacaatatttgaaccttcacatcatatgtacgcactaatttgattgaacgttgaaattattggagatgaatggtttttaagtattgcgtgaccgaacattacactaacgtattaattactttggtacgacagatgaaaacaccatccccacaatcgcaaaataaagaaggtaggcgaatctccatggaatctcccaagttttgtggctcccattagaatattaaggtttttggtgtcatcttattacaagtttatatccaccatttagtttaaacatctattacgcaattataaaatttcgaagttaattatataaacattcattgttttgtataatatatactattgaccatgtgatgcaatatcaactttgatttttaattggttgtagttaatttgttcgcaagattgttcgacaatagtagctggtttagtcttaatgtttctttttctccatctttagatacattatggatacgaatggtgatatacggcgcacccaaaatcgtatcgcaacagtgctgtaacagtatcaaaatctttacatatacatatgtatttatgtatttttgttactatttgaatcgcaccgcaaaatgcagtcatagtaaaaatacatttgaactagtgtatttatttgaaatgatatcttaaggatagaaccaaagatatactttcctcctatcaaaaaagtatgtagttccataacgacatggctcatcgtaatgtgaaactatataggtcttactcttttactattactattttgactaaagattataaccgaaaaaataatatccgtgatttcacacatatcagacaaaatgattagtggcaatctagcaaatccaaataataaggatgggtaaaaatgtaacatgagaacgacccatccctataaggcctacataaaccgccaatcactcctctaaaaatcttacgaaagaagagaacaaagaagaaattttgaaaatagtgaaaatggtaaccgtaagccaaagtcacacgacgacgtttctcttcttcaccacatttctcttgatattcggatcaatctcagccgtccgtttgcttccacgaccaaacactacaacaaccaacgatctagatttcatccgaacaagctgcaacgctactctatatccagacgtctgcttcacgtcactctccggctacgcctctgccgttcaagacagtccggcgaggctagccaagctcgcaatcggcgtttcactttcacaagccaaatccactgcggcttttctctccaaactctcacgctctgccgctaaatactccggtgatggccaccaaacagcttccgccgtaatccgagactgcgtttcgaacgtcgaagacgcggtggacgagatgagaggatctctccgtcaactacgcgacatgaacggcagaggaggcggcacggcagctcggaggtcggtagaaacgtttaggttccagatgagtaacgtgcagacgtggatgagtgcagcattgacggatgaggacacgtgtacggatggatttgaagatatggacgaaggaggattgattaagacgaccgtttgtgatcggctcgaggaagtgaagaggctaacgagtaatgctcttgcccttgtcaacacttacgccaacaatggagctccatgaccatgagaccatgagaccatgaggagttttaactttgatttaagtgtctctttatataatttaatacattgtggggtttaagttagagttatgtgtcgatttcatcatgttttacatttgtttttgtatcatccgagtttcttatgtttaaagggttcagagagatgttgtatctttgatttactaatcaaactgcacgatgatattaatataaagaccctttaatatatatagtagatatatatgtctcaacaatcacatggagtggttataagttttgttgtgtttttcttcttctccctcgacccgtgaaacgagtaggacatatcacatatccaatatagaccatgatcgatgtgttcatactcatttcatatacactttttatgagtgtgatctaaatttctgttgatgggcccacgcaagtccttccggacaagaacaaagaaaacgtctgtcttttactcacgagattgcactgtttccaaattgatcacactggtttgttcactacatgccggtttttgggtacatatggaaagggtgttattagctactgtttatgagaaaatatatttattggaacttggaaagctatttatatatattcttctttggaatattatcaagagttcaaggtttgtaaatgaattatacgtactgttgtagatagatttgactattatttaactatattagatagaatatatagatagaactagaagtctagaagtgagaattatattgtgtagattgtttcttctatatttgtatgctcgtctaacatttattattattattattattattatgccaaactgtgttattattaaaatatttaaaaagttattaatttattgaagttatactatatgtagctagaatgccttttggctaacatgtttctcaagtatttgtcaacttccgttttcactgtattctctaggttcattatcggtccaagaaattgattttaagccctcttcacttctctttctaggaatctactggttttttagaatacatctatctcggaaactgactcgttggtaaaggctatttctgcagctaaggaatggaagtccgctcagttagtagttaaagctatccctgtacccagactctctacattacctcgttctgaggcactaccacctcccttaccttttgttgaggagttttctcatctattacctcgtgttgaggcttctaatttgttacctccgactgatgttatttcctgttttacagatgcggcctggaatgcatcttctggctcttgcggtatggaatggatatttaaagctcaagatcaaagggttattcatcggggttcaacaactcgcctccatactccctcggctttggcaacagaagccctagaataaaggataaactatttgggccaattaatcgatggattcgggcgtgttgtatgtcaacgcgtgttgaaatatcaatgggtgcaaaaggatgataggaaatgagaacctaaaacgagagacacgtcgtatcgattgaagcattaaaaagtacgaaagataaaggcccaacaggcccatttagaataaacaataattttacgaatgttgtttaggggatttaactcatatatgcattatatatatcccatatatataatctttctacaagcaataacaacaaagatcatcaacaaaccaatcatgtggttctattactcacaaataaaaccatttccctcaaccaacccaatgaagaagatacaaacatgaatagacaacatgatcaaatgaggccagtgctacggaacgggttgttatgttggtttaccgagaaatcaccataaccggaggtatttggctgctgtgaaaccgggttaaccgggaattccccaaaatcaccaaatggattactattattagtgggagggttggactgatgctgatacgttggctggggctgatgctgatatgtctgctggtaagcaccgaatgggttgttcaccgcttgctgctgaggtgggggagctgtgccattggacgatgcaaacgggtcatgggacgcaaatggattgggagctggtgcaccgtagacaggacgttgggaagctatgtaggctccatcatcgtatagactgctaagtgtaagcgtatctaaccctccagcctaaacattttttaagcacaaaaacaatgattttccaagattaccttacagcctaacaaaacatcctccaatgtaaacacctagacaacaatgaacttcctattctcacggttacacttccaacttccataactagattaatagcgaggttcctagtcttaatgtaacaaatttcggtaaaacaatgcttgtgatgactctttcattatgaacacaccaattttctattaacaaggttcctagtctcaaagatttaaagattgaacaggaaaagttccatttccagccaaattattagccggcaactactaactggcgttgatttctgtgatctactgtttttaagcatatagcattatgtataacaaagagaataatgcttaccagttttctctcagtggatgcagagatatcgctgctaggtgctgtcaccaaggcaagctcccatcctgtaggatcgtaattatttggttgaccaaaatgaggagttggaggatcagctggaaacacagagatcagaaatgagtcagcaaagggaaaaaattataaagtaacacattctccaaactcgcagaatattagtggacatgtaaatggtccaacaagaagctcaccatctgttgaaacaatggctaaagcaagtgcattttggtcttcgatcactgatgtatcaggagcaccagtattcagaccctgtggggaaaattgaacaaagagaaattgagacataagaaacgcatgaagaatcaaaattaaaatcaaagtcataaagtgatcatataaaattttcacccatagatcatcggtatcaatgaagttctgagcgttggctgaaggaggaggcgggggagaaggttctgtttcttcagatacaacaacgacatcatctgaaggtaacatttcacgttcttcatgcgacggttcagtatcttcggtagtcagtccatcatccggcctatatgttagaagctgaatgtagaaaacttcattagcacataagacacagaaaaaaagaagccaaaaaatattggatcactaatatgagaaatatgcatacataccagtggttccgctgggacatcgacaacacgcggtgcttctttaatatactcctccattgttgtcagaaaagattgtggaggctgaagtaaacaaatgtaaagaaatgcatcaagtaacagaaacaagcaacggttgccaaattaatttatcaaagttgtccacagttagtacctctcttagaacaggaaattgaaaattccttgcaagttccaatcctttgcaggcttcatagaaatcagaaaggctacgagcctaaaaaacacattatcccttgttacacacaaaatgtgcgacaagtaaaatatataccaactgaaacagtccaacgaaatatcacctgctgacccgcacgcttgtatatttcaagggaagtgatggcttcatgttttgccatttcaaagaactgcaacatatgaataattaagcagggaaaaaggaaagcagatagagagatatgatagctatgatgccaaacataaaaactagacctaccttgtcaatgagattgatgattccatcattaatagcacaatagactttaaaactctctttcaacacctatcatacgatgacaaagaagtttagattttagaaattttcaagctt

SEQ ID NO: 150 - DNA, 73009 bp, Arabidopsis thaliana
aattcttatatttgacttcaaacaatatacgcaaatttaacgttttaaagcgtgtttatacaactcacatgtattaagtgatttcaatttgtattaaatgatacttgttaatgtagattacgtttttcgaaattatatattgtaatttcaaaacaatgatttttaagaaaagtattaaaatgaaacacttttaaaaaatatttgcgcatcttctaaccgaaaacaaaactatacacatttttgagtgtgaacaagacaatgtacagttgaaaatgtgtacaattcaaatcactcataattttcctatatactatgtcaaaactatatgcctcaagactaacttttttttatcatttcaagattattctgtaaatgattgttttatatgtttgataactaccaataaataaaagattaagaaaggtagatgactaccaatagactaatcaacacaattcaaagggaaatataaactttaacaaaagataccataaattaccttgcaggagatagagcaaaaaagattaggatgatcctgaatatatcttttacaagtcacacatgaagcaccattcttggcttttgttgaaggtcttgcatcttttgcttgtggccttgaattcaaatgtattgccttctctccatttattttatatgtctttttcccccatacataaattattgccaaccaataccaaaattaaaaacattaatttggaactctaaaacaagaattcaaatgattattttattaattattgaatgatttagatatttaaagaaaaaaaaaacctgaatctcggaacagtcgaagtagttttggatttcgaggagacgaataacatcttggtaaacgtatttgcagatctgaagacgacgatggaggaaatgagaatctgtaactgtgttacaacaatgtctgcatatttccacattacaatcaatgcaaaacacattcttctcgttctttctaagatacttatgattcatacatatcccaaagaactctgagttcagtagtgtttcaatccaaacttcttcacttcttctcttctcactctacaaaaattattgctattacttttttagatttgcataaacttaattatgatttataatgaattactatgaagaagaaaaaaacatgaatattatccggaaaaaaacaatctgtacaaatttgaaactttattgactttattttttttatatgaagaaatttaaaacttgaattagagagatcagtttacaattaggaaaagaaaaaaaaaataaaactacatttttgaaggatatggaatctgcagaaattttactttttattgaaatttataaagaatttataaatgggctatatgaagaaatcataactataaattttgcagaaattttcttgtttctaatttatattgaaactatgaacttgaattgaagggatttgttttcaacaacaacaacaacaaaaactaacactgcagaaattaataagaaaaaatgagcatgtaccagattcattttggtatgagaaactgagttcctttgatagatcagatgagaagattttatatttctccgatcaaaatcatccaaaaatattttagtgttcttggaggagaagaagaagaagaagaaggccaaaagcaaaaagaagaagagagatgtgatttgatttgtagtgtgaataaaaatagtagaagaaggcaaacgaaatattaaagaaatgatattaggaatgtttcaattaattacatattgtgttttgtggagaataataaattaaaaaaaaggaaactaaatgacaattaatattaaaaatgagggaaaaatcaaaagtccacagagtcaacaataactgtgactctttaatacctaaaatggataccaggcgggaatatgaagcatgtgtaacttttaaattactgttttgtctctagataaatcgataagtatgtttttaatacgaatgaaatccactaattaggtcattaatatgcaaattgtaataattaaaaatgagtggacataatttgactttgaggggcaaaaagttaagtctttataatttagatggtgcgataaaggtaagcaaagcttcctatatttactccgaaatttccaaggaaacaacttatcaaatttagaattatatcattttctacatatacatagataggaatatttgatgtcaaaaataaccgttccaaagtgcacataataatatcttaggcaaattcaaatccagcacatacatactatacttatggagagactagattattgcttgatgttcgcatacatagacaattgaaatttaaatagattggtgaaatttgttacagatttagttgaaagtatcctaaaaaatatcttatcatttgctcataatttataaattaaaaaaaaagtatatcacttgaaaatcgttaagatgaatattaaaaccagaaagtaatagtaaagtattttgataatgagcatagtagcatttatagattatataaaattgaaattataagtttaggtagatgtttctatggcattccatcttcgatacaacatatgacagaaagttttccctattcgagataatacgtatgcgggttttcacgtttttacgttttagaaatatgatttagttgaatacataccatttgcaaaaacttgcgatgattattaaaacgtggaaataatatgtgtttgttcaatttatcttgcacgttttaatacagatttttcgtctcaacgttgttgatctatgctgatagtagcactggatgaaagattagaagaaatacaacaaaaatgaacataccacttggcatggtgactcaatgatgtcttaaccctaactttattttttgttcttgaattaatctagtgtaatattgaatacaaatccataagataataaaataatatatatttttaaaattatgtattaaatgtatgatcacatcaatattataagttaataattatacaaacttatcaatatatatctaaaataattagtgacatatgagtatataactctagtattgtttttgttgttgaatctgcattatattggagctcatatctaatcttttttaactacatcaaaagctgtgaatggtttataagtgataattggttccttacatgtaaacggttaagtttgcctaacttagttccaattattggtgtcacctttgatgtttagattttatatcatatgatcagtgaacctaaatagtagatgcttaatattatgaagattggattggacagtgtgctttataaaatgagggacaccaaaatcatgtatttcattagaagggaaggaccaactggctcatagcaaattgaatgaatacggagactgctttgatattccagtgggtgtatggtccaaagtccaaacccataaacacatggctttattggacttgtgggcttggaatacaaaatgatttctcatagaaagtgtacttatagtaatctacttgcttaaacccctaaacacatgttaataacttaaaccgcagtgagttcaaaatactgtttggttcagcttttacggtttatgagttggattttactgacgaaatattaaaattttaagaactcaaagattgttatctttgcataaaaactacacaaagtagatagataaatacactaaccaaaagcttgcagtagataaaaacgaagtcataagtaaatatgcttcagagaaaagcaaaaaaagggagagcgagagagagatttatcacacaatgcttcatcttcttcttctactaaaacgttttacgcaatcttgattttttcaacgtccatccacagaagtgaacgagtcagcaaatccagatgggcgagttgggatacttgtctgcgtattgtctttgcttccataagccgaagacgaagatcccgagtcatccgcggtctggcttagtccctcgaaagcttgccatttcttaagcacctgcggaagcggcatatcgtagtctatcccatagacgtcatcagggtcggtctcagttggtttccattggacggtgagtgaagaaaggacgttaacgatgtgagccatgtcaggtctttggtaaggctcacgggcacagcaatgaccagcaagctcccagactttttcaatactggctacggtatcgtcgtcgaggctgatgtttgggtctattgcgtttttgaaggcattttcgtctttgctggctgctacccgacggaaccatgtgactagatggacgctgtcttcgggttgcgtctcgtctagggctttacgaccagtgattagctccataagtatgaccccaaggctgaaaatgtctaccttggtcgtcactcttcccgtcactgccaaaatcagagtatagaacaattgccaaacgatcaaaggatgaaactataacatttaggaaaatgcaataagatcaaagcatgaaaatttaagtgcaaaacggccaaagtatgaaactttgacactgggcaagtgcaaatcaattgaaaggcagagactttaaaatttgggtaagtacaaacctgcgtattctggggcaaggtatccgaaagtcccagctactcgagtctcaatggagtatttgccatcaggggctaaacgtactaacccaaagtcagagactttagcgcgcatatcatcaccaagaaggatgtttgatggctttagatccctatggataaagctctgatgcgcaagtgtgtgcagatactcgacacctcgagctacatccaatgcaatcgccagccgtctagtccagtctaacggttttcgcccttcctctttccagtggaacaaatgctgacttagtgtcccctgtggcatgtactcgtagacaagaagcctctcgttcccgtcaaggcagtaaccgagaagcgcaacgagatgacgatgacgcattttagtcagaacagtgatctcagatttaaactcagtaagtcccttatcactcacaaccgaagactccattctcttcacagctatttttgttccatcgtggagttcgcctttgtaaactgtcccgaaaccacctctcccgagaatattctcttcgctgaagttattcgtcacattcctcaagacctgtatcgatataaccaagttcccagcttcaacaacgtgaatatcactcgctgcacttccgctgtgactgtagctatcacttcctccaccactgttaagactagaagctgcaacagtgagtttaatgtcatcgttgtcacccgaatgatgcggatgaataaccatgttgctgcttggactttgaactctagcaggtcgcttccttttcttcgcataaagacacacaccaagcccaaccaaacacaatgcaccaacaaccccaccaaccacaggaacaataatcttgacattgcttgatttcttagaagtttcactgccatcacttcctcctgaaggtttacttcctggtgaagctccaggagcatcactcgttttgttaggtccattcttccccatgttagcgttcccttcagtcaccaaagtcacagtatcccgaaactttggcggtattccataaaaatcgttgttagacacatcaagtaacctaagcttagacaatgtggtaagctcatcaggtatatgcccggagagtttattatcagcaagattgatagtctccaatgaagtaagcttagctaaactcggagaaatcgtacccgagagatcctgtttcctcatattaacaaccgtaatgttacctccagaacaagtaatcccaacccagttaacacaaggattgtttcctttccaactttccgcaagcttcactggatatccaaatgattcagctacagataccaaagtatccacacgaggatcacaagcctcaccagctacattagtacaaaagctattcatgttgttgactatatcaacaccaacggatttgccaaacaacggagtcggtccttgaagataattattagttaaattcacagtagtaagcgaactcaaactaaccaaagactgtggaacaacaccagtgagctgattctctctaacattaaacacacgtagagataccaaaccagagagatcaggaattggacctgagaactgatttccttgaagagaaacctcaacgagcgaagtcatgttccccaataccgagatcgatccattaagcttctgaccattcaagaacagagactgaatcgaagtaccagcaaaactcatcggtaactctccttctaaaccattctgagatagtttcagattcgtcaagctcggaagtgactgagaaccgaagaaatctgggatctttccaataatgctgcaattggagagagttagattctgcagagacgtagcttctttaacggtgtctggaattacccaaggatcaaacggattgttctcgagatacatttcttgaagagaactcataccagagaagagattcttcggtacagaggtaaaaagattgtcgtgtagattcagagtctgtaaacgagataagccagagagatcaggaataggaccagagatacgattgagaaaaagctcgagaataaccaattcagagagactctgaagattagtaggaagagttccacgaatccctttttgtttaagctgaatcttagtaacacgattacttccatcgcattgaacagattgccatttacaagggttagggttagaccaatcgacgtctgatgtaagattcagacttgatttgagagattgcatagtcgaatcatcgagaccggtttgagaaagtgagaaattggccaaacccagtaaagagatgatgaaacagagagtacccaaatgggaatttgacattttttgttggagaaagaaacagagtggaggaggttaaaggtgtcgcctttgagaattctgagtctagggttttagggaggcattgaagaagaagaagaagaaaaggtttacagagaggaaagggaaagacgaaggaatcggcggagatcgaggaagatagagagacgaagaagattaaaggtaagaggatcataaaagcattgcctttttatttattattctcattcaaatgaaatatttattcttctgtaataaaatggatgaaccataattaataaaaatgcatactttaagttttgcttgtgtagagtgtgtgtgtgtgtgtgaatacagctggcaaggtggcataattagtggtgaaaaacaatagtgaaaatcgccgaataatccataattatgaataatgagattatctactaattgtgtttataactttatattaaaaaaaaatcagaattaggaataagatacaaattttatgacatttagatgttttcagtttaggtgaatatattattaacatttgtaaagtttgtaaataaaaatcacatttgaaatattttatttatatattcaattagagaattttactttttaggaagttttaacaattgatttgtgtcaaaattggtaataataaaagtaatatctctatgattgagtgtatttcggcatttttcggactaaactgctaataatatcgattgtctttcctaaatttttaaaatattttattttgtaatagatcttggatttttgttcacattatttccatttgcttctataaaaaaaggatattatttcctccttatgaatatttgtgggacgaatacaatacgtggaaacttatctgtatttcttagaatagaaaaagcatttaatacggtgacggtggttacctattgtttagggtcaaagattagtcgaaaattgaaatttcatcgtaacgtgctaaagacagtttaagattacaccgttttatttaattcattttttgactcattgtgtcacgacttcgtgagtaattatatactttgaataaaaaaaattaaaagattaatgagtactttgcattgcatggtcttaatcttctcatgactaattttgaccaaacaagataaatgtgatttttttgcagtcccgacaaaaaagtttttaactgtaaaagacagacgccgtgaaatccggagcatattagccacgcattaatcttcattcggctgattttttaacggtcgttatcttacgccgtttaccacaatttttaatgtttgttaggttggagagttattattattacttaccagtttcactctaacctagaactattcttcttcttatggtattgaatgtctgtttttattcactagtaataaatattataactatactattttaaaaatagttatagtacgatatgtagaaattgggacatgtatattgttgttgttaatcttatagaaaaatagtaaaagtagctaaagattggtgtattatacgcaccaaccatatactataaactcgcacgaaatgtagatcgaacacttgtgtacgtagaaagattacgtgacaacaacaactagtccactttgctgttcgttacggtcacacatcaaccacatttatttcacttacttcttttttcaatcatttcttaaattctcaataattctaaaaatcagatatttgtccaaacctctttggtgtagtggcacaaggaaactttaactcctatacctgagtttgatttttcatgaaaacaataacaaatttgtttagaaagtctctcagttgtgatttggtccaattaatttatttggtagttagaaatgcaaacggtatgattatccttggtattagtcggaaggcatttcaaattagaacctaacagtgtggtgatccaattctacctaaatcgggagaaattcattctgtagtatttcgttgcgttcctactgaaactgataaaataagtcgatagagtatataaaaaacaaacaaaaagtcagatattttctatatactcttcttggacaagttcctaattcttctcatcctttatagattacatcgagagatccgattaaagggttgttgattggctttggttatctcactcggtttagtgagatcgacgaaccaatagtaaaacgcagtcgtttttaagctttgctctgtttctgttgtttgaaagctcaagtcgtcgactgagctatagctaatgaagagttgtttgagctctttctctgatcttcgttcaactagctaaccgatttggttgctaaacaagctcaaaagatgaatcaaaatggtctcgtctcaagttataagaagatgttatatatggaaaagttattattagaacattacaatgtttaaacgactaaccaaatctgatacagtacaaacgatcccgtgggattaatacttacgctaagatcaacactgaaccgtcgtcttagacgttgtcgtttaacaacatacactagtcatggcaagctacattacttcggtgaaagaaaaaaaaaccttcaaaatctctagattgtgaacctactgtatgtacagaaaccaaaatgcatatcaatcagcagaatcggtccactcttccggctgcggagagagaaaaaaaactcgccggaagattggattacgacgaaggtgagataggattaggtttgaatgatttggcaacggatttatagagattctcttcttcaaaaggtttggagacgtaaccatccatcccacttttcagacattcctcgtaggtcgcgtgtatcacatccgcagtcatcgctagaatcggtaaatgccattcgagatttgtcttctctttagtttccttctccatcattcttatctgacgagttgcttcaaatctgagaatcaatgaagtttataaaagattttaaccgaatccgaaccaaaccaagtcagttataatttggcgggaaatttttcataccgaacaattcaaaaaccgaataatccaaaaatagtattagttgtgatttagttacccgtccatctgtggcatttgaatatccatgaagcaagcatcgaaagtgtgtggaatctgaagcaaacccaaagcaacttgaccactctctgcacaaaccacttctgctccaaatttcttgagagctcctgcagctactctcctgttaactatattatcatcaaccacaagaatcttcttccctgtaagcaagctcttgagagttgcgggtgatgatccttctggatgttgttgtcttgtttttctcagctcgagaacttgttgcagacacgccccaatcatgcttgctcttaacggtttcattattaccgtatctgcaaatcctgcggatttagctctgtcgaactccgaatttgtgatgtttgttgcgaatagagctagtttcggagacttgtgatgaacgtttccgttggttcttgaattcaataaacgaatctctgagtcattatcttcagttgaaatccatgaatctttctctactaagatcatatcaagttgcggttttgttgggagaggagaaccgtttctttcaaacgcagcagctgcaacaacagcggttttgagacttgtcacgacatcaacattgattccgagtcttttcatatggtatctagtcacagcagctctaacaggcttagcatcaacaactatagctttcattcctttaaaagtagaaggcaagtgttccacattaggtttcttcatatggttaatcgcactgcatttatcgcatttctctaaaacagccgtgaaccagaacgtgcttccaatatgaggccggcttatgaaatttatctgaccacgcataagttcaacaagacacttgcttatactcaaaccaataccagtacctccatagtttcttgaagtcgagctatctgcttgcataaacggcataaacacacggccttgcgcaactaaagggattccaatacccgtgtcttcgattgaaaccataagcctaacattgctagaaatatcaaactccgataatgactgctcctcagagaccaaatgcttgaatgaatcccagctattccgaccatcagcagcttcgtaaccgctcaatgtgttgtaacttgactgtttggaaacaacgatcatttcttcagacactccaccattcaatgcatttttcggttcagattcatcttttgattgttccgcaagatggactttaacaaagatatgtcctttctctgtgaactgtcaaaaagacaacatcttgatcaaacaaaaatcatatacacaagctgccaacaaaggcagagattgaaatagggactaactttaaccgaatttccaacaaggtttatgattatctgtctaaatctccctgaatctcctttgactatctctggtactttgtctgaaacgaaaaccgcgagctgccaaatttgaaatcaagaaattagcagccacaactccaaatagatgtatctttattccttggattgaaaacttacctcaatgcttttgttccttgactcctcagagaatagagaaaggacatcatccaatattgaacggatatcaaatggtactgattccaactccagctttccagcttcaatcttggcgcgatcaagaacctcatttatcaatgcaatcaaagctttaccacatacttgagcggtttgagcgtaatctctctgtgtcgagcttagttctgtatctaggagcatagcaagcattcctgcagaaaatttttaaaacagaatctttgaggcagtttgagaaaccaaagatgaaaggcaacagtactggaatttgtttgaagatgtagtaccgagaatgccattcattggtgtcctgatctcgtgagacacggtagcaagaaactgcgatttagcgacatcagcagcttctgctcgaactttaagctcttgcatttcatggaaatcatcttcgacttttactatgtgcatagctgcaccatacagtatataacccaccaagaaaccaatcgcaaagaacaatggcacagttgtgagcacattcaacggtattggtgccttttggtggtacctgcactcgaaattgttcaaacaagatatcagtttttagatatcagagagtattttagctttaagattttctgtgtggtacctgcatatcatcttatgtttcctgaaggggtctccaaaatcgagcttgctctcatgagagagagatctgtcggcttcttcatcttgattaccatacatgacaagtggatctgatgcattggtgatatcatacacatgcacaactattgcttggttaccagcaagctgaccaagtaaattctcgactagagactccacatcaaacgcaccaccaaggtacctgcatttcaaattcaagcatcaatctttactttacacacaaaccaatcttgaaatctcaaaaaacctctttcctttacatgatcacacacataaaccaatcatgaaatctcgaaaatctctttttacatgatcacaagcaaaagtttgctccagtaatcagatgggaactttaccctgcagtggctgcaatacgctcttcgacagtcggattttcaggaagagaagacttgtagacagggaatgtcaacacaactccgagatggtgagtttccaacaacctaaaagggctagtcaagacagcttttccggtttctctagctcgcaaaatattctcacgatcctcctgcagaaaagatagccaaaattcagaagaggtgcaggtcggatacttaaccgaaaaaacaaaaccataagtgtctgataatgtttatattacctcgcctgacatcatatcgagtgactcaaggtaagagacactatcttgagagaatataacaggagcatactcatccctaaccggtgaaggctctcctctatccattgtctttataacccaattgtgctgccgctcaaacatctccctctcaaaattcacaactttttcagcataagccactccacttagcaacggtctctcaaatgctgttcttgccgtgtactccgcaaatgtctcctgcaaaattagccacaaaccaatgagtaaagcaaaggcctaaatttcccttcatttactcaataaccaaacataaaagagtaaatttcaaaaacttctggttccaaaaaaagtcaactttgcatttatgaatcaaaaatttcaccaaagctttgagcttttaataaagcacacactgacctgatcaattgcagaagggttcttgtggtaatgaaaagtggagacgagaatagccaaagcatgaacatgattaacactaacactaaattgatcctgcaacattctagctctttgatcacacatgctgaccaaaacctcttcccttctaatcttattagcatcatccatccactgataaatcccactgcttataaacccaacaatgatgatccacagaatcaaagcttttggtaacaatgctcgatgttcttgtatgaaagttgacccttttttattacccattagatcgttattattattattgttcatcttcaccgccactgaatgctgaagctgttgctgctgctgcatcttcgcaaaacccatcaaccccgaacgccaaaaatcgatctttctcggcttttctgacgaattcagagcaccaccaccacccagttgataaaaatcgctgcttttcaagttttctagtgactcggaatcagaaatttcaattcttcgtggctcttcttcttcttcttgatgattgttgagtgcccagttcatatctgagctacaacaatagagaacaaaagaagaaacaatagtgaaagaaaacaaaagttagagccttttttgcatacatataacataaaagcattggtagtgtagttatgattaagaatgttaccataaacatagtttatagtacagaaacaaaccctagaaacctgtagacgaaaaaggacatgtttttgcgaattcaagaacaaaagagagaaagaaacgcatggttctcaaaagaagcaactttgctcagtttccaaaggtttcttacagagaagaattaaaaactaagtaattattgtcagagaaattaattaatactaaaaaacacactaatcaatcataagctctttacaggcgtgattgtttattattggaacaagaacatagctatgttcactgtctcaaatccaacaatagaaaaaaaattaaagctttgaccaaagaaagaaagaacacagagagaaacataacattaggaagaacgactaataagcaagcacatggagaaattattttagttacctgtaatgagttgtgagaggattgaacattgcattattattatacacaaaatctcttctcatcacttcaaatgtaggtattccattttctttcttctttcttcttcttttgttttagtgagattttttgcttttaaaagtaagaaaaaaattgaatcgaattttttagattttcttcagatacgtttctctctctctgtgtctctgtctatatcagttttttgccatgaactttcttttcatttttatatctctctagctcttttttctttttctaacttgagtccaactttgaagaagaaaagttttggactttttcttaatggctcatgatatgatccatccaacaaaagttattattttacccaaaatctcctcaaagttaacattattatacgaaatagatatattttctctaaccgaattgtcggtatttactgtgtatttagagaaattgcaaagcgacaatgaagaattcacaaacttctctttatctataattttttataatgctaatataaaagcgtataatttggcgcggaagatccgcaccgaaccgcatcatatcacatttgtaaataatatccctcaggattggtttacttgagctttaataattttggatgacaaaaaaaaaaatataattattgtgacactaactaggtttgtcttactaattaaaacatctttaaaactacatttattcaatttcattacatttcttatacatcatttaacatttaaagtaacatttaccatgtttaaatttcttgaataagtgaagtaatatatagtcaccaacttctcaaaatttattatctattttttccttggtataaataagttttctgaactttagaaataaaacgttttgttttgtttttttacttacaccaaaaggaaaataaaacgtttttttgttgaaatataagaaaacaaaaaatataggtgagtgagagactttgtacgagagtcgctatcgcatatctttggcgataatgacatcgcgacaaagcgcagatctggccccatagaccttttacctgaaatacccaccattctagtctcttaactacgaaaataccccggttaaatgggcctgactcataagcccatgatttatccacgtgtaattcttaagacaattgcatgagttgattcaggagattttagaattcaaaatttatgaataacaatcaaattatttatttactactagtattatacggtaaactattttttatattatttagagtgtttcttttttttgtaatagcaaattgttatgacctaaccacaaatttaaaatgctcatgaatttctaaaaacgttaaaaacaaaaaatcattaaattattacatgtttgaggcaatagtaaatcaatcccattaaattagtaccatattaaatgataacatagttatgagttttataatgaaaaatacagaaaaaaacatagagctattattaaagatacatgaaaatattattattaccttatatgtgtagatggaaactgacgtgggttgtgtagctttctctcgtgcgcttagagacagtagcttctataactacatgatatttgagagaagtttttgaatattcaaatggattttaggaacacttgtatggttcctttgaaatatgcagaattagaacttaaagcaagattgataaacatagagaagatacgtgtttgggataccttaatttcatggcttgatcagaagctttcagtcatagatgaatgcagtgtagtttctttttccgctattgattctttgatcgctgcacatgtcacagaattttagtaatgatttttgttacagatttctatatatgtttataacagaggccagtgaaactcacattgtgctcttccgagaaagaaaaaacaaacaatgaatctggaataaagtgaaattaacctaagaaaaatagaagacaataaacttggatcgaataccattttttctatacaatttcatatcgatggatctgggaatgatttttttttttttttggaggaagcaagagcaagagatagatttaacgtgaattggatttttgtagaggaagataaaacggtttggaaaatcttgagttggttacaaatttccaaagataatgatggtgtggtgtgtgagaaaatctaggaatatttttttgtttttaaatatgtagaaaaaaaaaatgagcgttttttttttaaaaaattttaaataattctttaaattataaacaaatcttatgtggcataattttattgggcaagggacttgtactttatattataaaggaaaaagaatttattttattttcttttttgttcttttattttattttttaatatatatatatattaaaatttaactcaaatgggtttgggttagaccttagagaaacataaatggttaaaacctaacgaaaataattgaaaacaaaaatacaatgtgtgaatccctatacattattagtcaatgcattgaaaaaaattgtttgaaaattgacaaaatgggtcgatggaaatatcaaatatcctttttttgttatgtatggttaatttagggaaatgtcttataaaaaaggtgatccgtttggcattgaccattgtttcctctttttcttatacttcattctctttgatatctatatttctactacctaggatggacattcttttgtatgatatggagtcgaaccaatctcattttacttttagtttcatcttcgcttgaaccatgttctacacaaatattcttgaactttttcttttaatttaaacactctttttcgcaacttgttgatgatcgatgttaaatgtgactagatgaagatgaagatggcgacgttggtgtggcaatattgctactcagtttctatcaattatagttttccgacgtgagattcatataaagcatccatttcatgttcatgtaggacacactctattttttcgacaagtttgctaatttttatcctttattcacaaagatgtaaaaaagtagaatatatggatttagtagtacacaaagatagggggaaaagggggtacacaaaggaagtggtgctaacaaaatgtgtgtgtgtcggccatgtgagattcatgtttgactttatatcattaaatcatttagtggttacaatttacaaattctccttatttattaagattttataagattttgtaacatattctatttttcggtgtttgtatttactctcaaattatgtttttttgtcacatgctcgacaatcactcccattcaaccaattcatttatttaaaataacaccaaaaccaatccactgtatttcataaattaatttggttatattttcgttagttcttatactgcatgtttataacttttaacgattcttcatacaaagtgttcactattttgagtcaaaaaagcagactagtgtaatcgtcctttcttcaaaagtttatataaacaatcacgatttaataattactatctcaatcaatcgtaattcgaaagtccaatagaatattttatagagataagatcaactacattcattaaataagatatcctatgttaaactataattatcactcataaatcaacatcgatcaatgattctttgaccaagataaagttattgtaattaggtgaaaaaatccaaagatttcacactcaaatgacacacaaaatctagcatatttgttttcaagaataaagattgtccatgttcatgaacaaacacaaacggatgcttgaaatttcataaatttacctaagattaagaacattgtcacaaatcattaaaagattataaagttcacatatatcattaaatatatactaacaacattgtcaaaaagatattaaaaattaatttttgactcacaatcattaaaaacatgaagccatttactaatttaatactaatatatgatttggaaacaagtctttgaatctctctatacattgttttgacaccttaaatagcgattactagactttccacatatttcatggaatcgtgtggactttggtacgagaaatattttaaatcatatttaattttttaatggttttattttccatttttgaaaatattttctcttttgaaatgtcattttccaatttagttttaataatttatgcaaaagagagattaaatttctctgattatacttttttttatataacctaactaatttctttagtttttcttttttaccttcttacattgctttgggccgctaaattgtacattatgttcgtaacagagtcatagatctaatacttagaaaatattagaaccataaaactaccattaagtgggcttttacgtgagatttcataattggacgagtatttcgtatttgggttgggtagccatatattaaagaacttattgagctgggccggtttgaaaaagacgaatatagttcctctgaaatgtatatcagatatttgagatagtagaagaagtatgggctctactgggcttgataatttaaggcccatattcgtgccctgttagttttaatttaaatgagaacattcccataaaatagagaaattcaaacaacaaaacaaaataaaatagattttgttgtttaacgataataaataattttaagaatcctacccataaaaaaaaatgtttttttaagaggatgactaataccagtattaattaagagataatgattttatagtggttgtcactgtatttgccacaattctcaaagcactcttctcaatattcttagtgcctttgttaatcatttttctcttttaaccttttactttacataaaaaaaaaattcatcagacaaaataaaaccaaactatattttatattttataaaattccgtattttctaaagtgatttttaatgaccaccatcaagttgatcaattggaatggttattaattttccgtttttaacatttatacgtgtcctacatatgataattggtaatcatttcttgtttgatcattttttttatctacaacatcatcaactaatgcgacagcctcactaattagtaattacactaatcttatcatctttaaaatgttatgaggaaaatgataatgaaattaaataatctgtcaaatataatgatattattttcctaacaactacttactctattttttttttttttttaacatctgactttattaatttgtaaagggatagtacaaatagagttgtagccatcttggtggtacatgaaaggtttcatacaaagaagacattgagtttgcatactttgtgagtttgtccgctgccaagtttctctcccgattgacataaccaattgatgagaagggtaacttagtcatccaaaaccgaatgtcataaagcagtgtttcaaggagatgatgatcttcagtcttgttaattaggttcgttagctccagattgtcgccttcaaaccacacataacagtatccacgtatccaaaccatttgtagggcatgtaagaatcccaaggcttctgcttgtagggctgagtatgattgttgtagtttcgcacaacctgaatgtagtacacgtccattgcagtcacggagtatccaacctgtgcttgtataatcccttccctgaacatagccactgtcaaagttacatttgagaaatccctccggtggtgaactccattgtttacttcggctcaacggtcgatcattggactgtgccgtgttgtgtgagatagccgtatcattaaccatagtttcgacccattcggttgcttcttgttctgctttctgtgccaccttccaagggaaacgatcaagctgttgaaaaaggtattcgttacgtgatttccataagcgccacattatccaaaaaggcatcaagccattaagaatgggaaggttttggtttttcttcccctgcaatattagtcgtatattctcttcaagattatccgtgaagcaaagtcgattactcccagaaaagtttgcacttctccatacaacctgcgcataagaacaagtaaaaattatgtggttaattgtctcgtcggcattgcagcatctttgacaagtcgggtctgctggaatgttcctgttccggagttgagtggttgtggataaagctccggataaacagcgccaaatgaaatgcttgatctttggagtgatcttcaatctccagatttcttgttttaatggaacgtctccttcaaggggattaatgatttcctcctctgtaagattgacatgagtggcaacccaataccccgatctcaccgtatattgagtattgcgagtatacgcccatttataagagtctctagcggcatagttagagagatacaaagatttagccagttgttgatcctccggattaagaactccttcgaaaatcacaggatcccattctcgtttattttctctccataaatctgctactttcatgtcctcatccagaattgggccacgagcaggtcgcgggggaagtgttggaagccaagggtcttcccatatcttagtagtttggccatctccaagccttacccgtaagccttgttgtagtaacaatttcccttcttgtattgagttccagccataagatgcatgtcctcccttattcgctcttaaataggtagtattgggataatacaatcctttatatagacgagcaagaagactttgagggttagtgagaatgcgccacgcttgcttcgcaagtaaagctcgattgaactgatggagatctttaaatccaagatcgccttcttttttagggagagtcattctttccatgctacccaagggattttctttttaccattctcctttccccaccaaaacgccgttatcaaactgtttatctcattgcaaattaaagtaggaagtaagaagcagttcatcgagtagaccggtagcgccattgctattgccttaataacaatctcctttccagctggagataaataattatatgcccatccttctgttcgctccttcaccttcgttacaatgtattcaaaaagttccacttttctacgacctaactgttcgggtaagcccaaatatttacctcctcccctaacgttatcgattcccagcaatctatgaagtcgttgtcgtctcatggttggaattttttgaccaaaaattattgaagatttcgcgtagtttatcttctgacccgaagcttcttcatatttcttgaaaatcaacgctagctgctcaatattctgattagatgctctacagaaaaacaaggaatcatctgcgaacaagaggtgagatatggcaaggcaatctttggtaatcttcatcccatgaatctgtttattaacttcagctttacgcagcatattactcaagacttcagcgcaaaacagaaataaataaggggatagagggtcgccttgtcggatacctctcgatgggaagatcttaccatagggtgatccattgataagcacctcataagaaacggatgttacgcaagtcattatccatttgacccatctcggtgcaaagcctaattgtatcataaccttttccaaaaaattccactcaactcggtcataagctttactaatatctgtcttaacagccacgtacccactttgacactcacgtcttgatttcagagaatgaaggagttcatgagcgaccaaaacgttgtctgatatattttgtcctgggacaaacgctgcctgagagtccgagatcacatctccaagacactgctttaagcgcttaatcaaaatcttagagataatcttgtagctggcggtacagagactaataggacgataatccgacatgtgtttaggatcgatgatcttagggatgaggcaaatctgagtttggttgatttgattatccatgacatctgattcaaaaaaatgtcgcaccatcaaacaaacatcattcccaatcagatcccaaagatgatgatagaacgcagccgtgaagccgtcaaaacccggagctctatctgcaccaatcgcaaacactgcatctctaacttcctggtcagttacactctgaagaagctcatgattcatctgctctgttactttaggggctatccctgaaataatctcctcccagtctgaagtctgagttgtagtaaacaagtcagcaaaatagttttctgccactttacctatagtatcatctctgaagttttctattccctgagcatcagtgattgccttgatcctattgcgagatttccgaagcttagtggaggcatagaagaacattgtatttcgatctcctagtagcatccatctgtttctgcttttgagatgccaataaagttcttcgtctctataagcttggttaagatcctgtctgagtcgaagaattgtttggtgtggcaacgtgtggtccctctccgccgcatctactctatattttagcgtctcaattttctccgcagtattcgtctttgttcttctcttccactttgctagttcttgtctgcaacaatggagcttctcatagtatccaccatgactatctgatcggcctcgattccagcctctttgcacggagtcaacaaagtcttcaaattgaaaatgacgacgatcatatcgaaattgtccgcgtttagtgcacacttcttctgcaatgtcgattatgacaggggcatgatctgatccagcaatcggtaaaaactctgtttcaaaagctggaaatgaagcttgccagtcagaattgatgaagactctgtcaaggcaagattcaatggtctcgttctgcctctttcctacccagctgtaagggtttcctttagacttcaagtccttcatattgcaacaattgatcatatttgtgaaattttgcaggctgccaatactgcgacgtcgaccgcctttcttttcattcagattaaggatctcattaaaatccccacacatcatccaaggtcctgaacgatgtgctgacactctttggagtttttcccagaggtggtggcgttcactaggtattgggtgcccatagatgcaagacaaatagaaattaaaatttttatattcaacatatagatctactagccttacatcatgagaaataacttgaattgaaagatgctttttccaatacacaactaaaccaccacttaaacctctaggtgaaataatacacatgtcttcaaaccccatcttaacgcccaaatcccttgtgtagttgtcttgttgttttgtttcaatcaggaacaacatgtccaaaaagtacactctttgtacttcctctagacgtcgaactgtcaaaggttgtcccaatccttgacagttccaaaatccaactctcatgggacttgtggtggtaccggccccaccgcggctctgccctggttctgtttgttgatgttgtcttcggatcccactgaattctctgagtcatgaccttcagaatcctcttgagaagttatcttcatgcggcgagaggaaccagaagcttcacccacttcaaagttatgtttcctttttcgcagctcttgtgataggagttccacaggtcccagaatatcacctgtcgcattagcaaaagaaggaactgggttataaagaagatcctcatcacatgtccattctccatggaacatgttacggtcattgtcggaggagatgtcctctaatgcattatgggtcgggtcaatgtcggagacctcctcttttgcttcattgacatcagcaccaacgggacctggaacaatttcttcacccacttcatcaccatcttgaattggttgaccatcatcaccaatctcctgaatgtgtactccaggatttccatgaaactcttggtcaccatcggcattgtcatcatcgccatcagaatcatggagagctccattttggaggacacaacttccagcatcatgagtcattcgtccacaaacatcacagaagccacgaagacgttcataatagaagcttagcactgtgttcacgccaagggagaactggtagttgcgttgaaatcgcagggggtgattcacatcccatttgatttggatccgaacaaattcgactctggtggttgtaaaaggatcgaagtcgaccgcttttcgctcaccaagggaccctgctatgttatcaatgacttcgagattcagaaactgtaggggaatttctcgcacttggatccagaaaggtatgaaattgagcacaagaggatccatatccggtgtccagcgttccaccaccagcatacgatccgcaaaagaccatggaccgcgtctcagaacagtgtcaagagattcttcagatggaaagataaattggaatcgtcgattttgaatgattctgccacggacgaaaccaaccaaaccccaagttcgtggaaccgtagtgaggatctgacggagattctgatttcgcggcatgaggggtctacccaggaggcaaaagcggttatcatccaccgccctttgaacaatagcctgagggagagcaacgggagtttcgtcgataccgagattgatgttctgaagggcacgacgaacattatcagccatgattagtcggagaggatagaatcgaaagagataattgattggaggggttaaatgtgagggaatggagaagaaatctgcaagtctcttctttaaatagattcgaatccatcgtggagtaacaacagaatcgtggggaactcccactatcctattatgaacaaccgcctgatcatgggagaagaggaaccgccccactccggcgtaaaaaactgtcagaatcttcgagagaagatgacgaagaagtaaccgtagcgaaatcgccttaacaatcgccatttttgtttgtttttctgagagtctttttttttttatctagctttttgttatcctctatttttttataaagaattttttctaattataaatgtaaatatttactatcacctagtaataaaaataaaatctctaggaaaacaatagcactcctttgaaacattttttattttttttaaaatacgcactagccatttaaattcattcagttttggagaaaaatcattcaagttacatactttataataatctgtaatcataatttcaaactttattattccgttgttaggttgcatggacccatcgccacaggtgttgccctatttaagaaggtacttcgattaatcacgatgacataaaaatcaacattaatataacggaaaaactatatttgaaaatataatttttccatttcgttcacatattcgaactttgaggatagatgttttgactcttaggtacataaaatggacccattggtgtctttggtccacacgagctacatttcaagctatatatggataagataaacaatttttcatttaaaatgttttaataaataagcttcattgattatatattggtatcaatttatcgcactgctttcccaaatttttttcttttcaaaataaaaattgtcatgagggttatgatattattatttattttttaatatcaggaagttctgcgccgaagctcgtaaccccctcagacccgaaatgaccgcatttaatattagtttcgtcctaaacgtcattcgaatcggcgacttctaagctttgcctatactctttaccaattgagctaatgacatttaatgagggttatgatattgccacacaatggttcgaaaaatgaggacgtgacaatattagattgagacaaattcacatccacaaaacaatataaacagtctatccataacacgacttcatacttatcttcgctgtctttttctctctaccaaatagtttttcattaaagttacttgcaattgcacgtaagtttaactataccaacaacgacattatcatgtttataaatgatccttattcatatgacataagatacaataaatcactacgcttttataagtatatgtcaacttctatataacagtataatttacaaacaaagccttgataacagtgattaacttaaccagatagatatacgataaataagagcattcgtgcatgatctaatacaactagtttagttacacccatttagaatctaaatacataaaatattttaggatcataaagttttgtgaactttcaagttttggagaaataaaaagcttatgatttgtcatgggatcatccaatgaccaatgtgatgaaccatactgcttaatcataactattcatccactagcactcagccactcacgtaaagaaacaaaaaaaggaactacacaaagagccactattaataagtttaatcaatatattttttgtcttttttcatatataagcggcaaataaaatccgccatggggccagagacagatgttcaaaatcaccatgtaatattgtaaatttgtaatcattaaatatgtaagcttcttatcgtgtatgtacatcatatatatgtgctagaaaatttgtaatctttataactaattaattaagaacttattatctacaatgaacaaaagaactagatacatcatatacatataacaaagattcataacatctttaaccaaaaaaaaaaaaaaaagtttctatagaaacaactttattttcttcatcggattttgagagacgtaaatttttccaagtaactaaaacgttcgattcgcatagatgatgcaaggactaatgatgcattggaaagctcacgcacgattagccgtacctgagttacacattacgagtttaaggaattcgtaaattgtgtcacttacgttttatacaatatgtgattcaaggaaactcaaacatataccgcatttggagataaattgattaacactctagtttttagacatattatatatagatgaagtagttgttacaaaaattgcattgtatgtttgtgatgtcgggaatatatgatgagaaacggacctacaaagaaagaacaaaaattcttcaaaacaaaataaaataattaacaattatgaatgaatcttgtgtatatgtactcaatttgttattgataaaattgcaccccaccacactacataacgtttggcctcattgccattggttcggcggaatctaatgattttaaatccatccacttgcatactatacaaaatataattttgtggactggaacgttatatataacagaccgaagaaattaaacaaatgaatgtccatgttcaaactttgaagctcgagtgataaaaccgcttgagaacaccaatcatcattttcctacactaacaactatttaaagatatggtatatatgatcaggaacatgttagctaaatacaaagcaataattattcacatgatgcagtactatacaacattgatcaatataatcacatggttattagctttatcatttttcgtttgtgtcaaaaatattattatataactacacacctcattaaaatttagaaatagtgaaccggctttgttgaaactataaagttcctcaacaaatattgacaaataacaatgccttaagtaagataacaaaataaaaatcatcaacaaatatctttttgatataagtgtgcctcgtaaaagaatgttttataccattttataggtgatgatattttttttattgacagcttgaaggtaatgaatttttcatatagtttcatgttattgttgatcatatgtagtatagtttgtttttacggcaattagtataaatttaggaagaaaagatatgataatatttgtatttttcacgtaaaatatgatttggtttggtaagcaataagacaaaagacgttggttgtaaagtagtaggtgaatccaacggagacaggtaatatgacttcactgacaggggcaattcagtcatattttattttattgacaaattacaagtggcactaatattcgtttattcaagaatattgaaacagtagaataaattttcactgatcaaactatatttttttaatgtaaatccgcatttacctaaacaatttgtccttgtgtgtataagtaagtacgtgtacacaaatttgtattttagttttatttcctaaaacaattaggatgatcgttttactctagttatgatttgaatggtaggtgacagaatcacaattgttttgtgtgtggctcataatacaactgcatttaataaaaaatggaatggataatatgttcttaattaactacgcccaaggaacatttttatttttgataaaaaaatgttttttttttggctttattttggaaatctttcttacaatttcattcataaaatataaagaaaaagaattacattatttaatttttttatttcgtttttatcattcaaaatatgtacttacaactgtttttttttttaaaaaaaaactgtctgtagtttgtatattaaagataatgattcagaactgtttgatgatatgtatgactgagtgaacacaacatctataaaatctgaatctttgggtccgattatgataatcgtctttatgttttcttgcaaaaatttgaaagttcactacaaacgtacttaataacacttaataaagtatgtaattcatttgaatttggtattacttctttagtttcttcgatctgaaatatacatgatttgacactgatttttttttttttttttttttgataatatacattttcagttgttttaaaggaaattcaaatgtgtatttcacttgcactctcatcatcatttagctaggaggtttacaaaacagaagttcttgaccatgaaaactctcaccaaagtgtgttgggacaccgagaatcaaaaaaacttctcaattgttacattttgaaatagattttgctaatgtggccgatgatatgatcatggaacaaatggataattggttactaaaaactatagataatggattatgcacttatgcagtgtatcacctctgtttctaaaacagcaaaatatacaatactgaaatatgtaaagtattgggtaaaattgtcaacaaacatcttgagatatttcttccagaaaactgctacaaagattctaatcaccatcgacaagaacattaaactaatgtgattatgtgaacaaccattattcaaattatttagttcctatatcaatgaaaagaaagttcagaacgtcaatctcgtttgatacataattctaattttctttctcattgctttatttaagtaagatatcaacggctgtgattctctctgatgacatactgatccgtgcggattaaacccatgcaaaaaccacacgtgaatattccacattgtcacattgggatcttctaattactactagattcacatgtgcttatgctaattaacctcgcacacgttacactaaaatacgcctatcaaacttgttgggacgatgaccgttgtgacctcaatgaaattattttttcccatccaccaaatatgaaattaaaataatactgatactgattttacatgtagtactaattattagtatctatttacgcgtgaagtattggacttctctgacacgactgttaccaaaaatggagttaacggcgttaacattgctgttaactgcgtgtctgcttactagatatgttagtgggcccagtagagattttaacggttgttatgtgctgacgtggactcatctttcttaacgctgctaattaactccggcacaggtaacagtaaccagtacgacaccgtttttggggttgcattcattggcagcacagagccgcgtcgccaaacgttagcgttttaaaatccacccgctccacatattactcaccacgtgtctttatttaaaacccgcgtttccttcacgcgattctcatttaacggagccgtgactttttcaaaaattgtttaccgttggacaaatgtcttattgtcctcataatgtcagccttatttacggaaataccattggacggtggtcgtgaattttattaacaaagaagggtattttggagaattacatcagggacggcgtattggggcggctaaccccatccgactttatatgcactttatgggaaatttcaattaattaaaatatgtaaaaactataaaaatatgaattaaaaatttgaaaattcaatgatacgccttttatttttgactgtgaaagtcttaaaaaaaattgtttttaaaaaacccaaatgattcaccttttcttaaaatgtaccccgtttgtcttcgaggagagatctctggtccacaacttttttattagacaactcaaaaaaattatattcttttcttttctgttttgtattatgagtttttatttggtatttttgcactttatcccttctcaaagaaagctctacaaagcaaaacccaatttgaattaaacttcatatttaccataaatgattacaccatgaggcgatttttataccattttcaagttttgtgaaaatattagtgagtttgtaagttgtgattttatgggttttttttgttgaaaagaaattgtagtgttggtaagaatagagttgagctgacacagcacctgtgactatttgtcgggacacatgtgtaagaagcaaagcctctcatgctttcttgcttctctttgttttcctctcgtcgtcttttatatatccttcaattatcatttttatgtatatatctttttgctagaaatttaaacatatatatatatattaaactaaagaatctgtatctcctttttacattgaaaagaataaaaaattaattatggtattagcctaacagtaccgattatcaaatataaatgttgttttttttttcgtctgaaaataccaaaagcccgcatttatatttttattttgtcatcagatattatttaaaactcaaacgagctaaaattgcgggaaattacgagataccgtatttacattttacattctaatattctatagaaaggaaaattttgacaggtatttagattactgtttttgcaaaattaaaatctcctaataaaaaccaataatacaaatatcaccaaatatgatagaagacaacacaaatacactaaaaaaggaaacatattaggtaacatgatttattataattttgccatctaaaatatggtttactttaaatatgtagacttctggaccatataaaattaacataattttggaaactatatccaattatatcaatcaaatattaaaaaactatataaattttaattattatatactctaaatatctatacagctggacatataaaaatttaacaaaattttggaaactaatacccaattatatccatcaaatataaaaactaaatcaatttaaagatattaaaaattgttgagaattcgttaaaataatttaaaaaatcgaaatataaacgacccaaaaagacagatggaaaccatattcactctctcttcttcattagcctttcgtctccttcttctcttctctatctctctttagcttctctacgcaagcttattatctctttctcttaaagctttttctatatacaaacagaagcgtttgatactgtaaaaaagatttagaaatggagactctgagtcgtttattggttttcatgtctctgttttccggtttagtttctggatttgctctgcaaaatcttccaatcacatcttttgaagaaagttacactcaactttttggtgacaagaacttatttgttcatcaagatggcaaatctgtccggttaacgctcgatgaaagaaccggtacggtttaatcttcctctgttttttaatttccttctcattttctcggtttagtaatgattttgtttttgcaggttccggttttgtttcaaatgattattacttgcatggattcttcagtgcttcaattaaattaccttctgattatacagctggagttgttgttgccttttatgtaagtaaaatctctaattttagctttagaactaaccaattatgattagtttcactatttgatttgggtttagtataagtactaatgacttttttttatattgtgggttgttgttatgtattcagatgtctaatggagatatgtatgagaagaatcatgatgagatagattttgagtttcttggtaacattagagaaaaagaatggagagttcagacaaacatttacggtaatggaagtactcattcaggaagagaagagagatataatctctggtttgatcctactgaagattttcatcaatacagtatcctctggtctgattctcacatcatgtaagtaaaaaaaaaagtaccaattctctcttaatctttgtttgtttggttcaatttaaaggaggttaggctattgaccccatttgatttaaaagctttatggattcaataatatgatcttctatttaaggaaacccaagtggggttttaatgatgggacgatctttttgttgaaaaaatatgattcaattttctttggtggatattaattcttattacttcttgtggaaagttttgtgatgcttgggacattatttgcttttggttgtaatgttcctgtcaattttcaagtgtgtgtgatcgcctaaaatggtttacagctttcgttttttggcatcaacaatgaccccatagagagtatgtttggggtccaattcacaagttgagaatctttacttaagttcatcaaaagctacaaatttttatgccaataatgttatctttctaagcttacagaatctaacttacttaatccaaataaatgttttttttggttataattatgtagtttgtactaaactactgatcaaagttgtgaaattgttgttctttttggttatgcagattctttgtagacaatgttcctattagagaggtcaaacgtactgcggaaatgggtggtcactttccatcaaagccgatgtctctctacacaacaatatgggacggttctaaatgggcaactaacggtggaaagtacggtgtaaactacaaatatgcgccttacattgcgcggttctcggatctagtcctgcacggctgccccgtggaccctatcgagcagtttccgaggtgcgatgaaggcgcggctgaggatatgcgtgcggcgcaagagattactccttcacaaaggagtaaaatggatgttttcagacggagactcatgacatattcatattgctatgatcgggctaggtacaatgttgctttatcggagtgtgtggtgaatcccgctgaggctcaaaggcttagggtttatgatccggtcagatttggcggcattccgaggcgccaccgcaatggaaagcaccggagcaagagaagccgggttgatggaaccgagtcgatatgataacatatataggcaaaatagtatgggtgagatttgggggttctataataagtccattattttggttatttatgattcaatgcattttcacatatagaggaggcatttttgtcatttgttagttgtatatcattataagaaaagaaaaaataattaatttatttatttgtgatattttttttatatatgataaattgtttcttgtttttgtgaatactttacagttgtttacgaatattatcggtgtaaataatttcagatatcttggaatttatatttgtattcaattttgtgtactttatgtgacgagagttttgtctcgcttgtacttgttttattcaatgggtccgacgaatattgttttaattttgtgtggtcatgttcatgcacatatgtagtattattattacatacaacaaaatttttatgtgatcacacatggtacctttcgcattcgaacaaaatttgagcttgagtaaacaattcatttttgtcaacaaaaataatgtttgtttcgttattaacaaacgatttaactataaggaaaatatcaaaagaaaagtatggagcaaaaaaattgttttttatatacatataagtcggatttggcaaaattttagggaccatctaaaagatagaattgtgaaaaactagacaaaattggcttagctcattattcatttgtgtttagtcgttttgaagttgatggttttgctttttttgccagctattttacaactgtataacactctacttgcttccaaaggttttgccacgtaagctaatgtttatccgcaaaactacttttaaataaattaacaaaaatatcattttcaattgggtcgggtcatttcgggtcgtgtttaccgggtcggataattgatttcttcttcttcttcttcttcttcttctctctatctcaagctcgctaagattctcatcaaatttcctctttagactaagatagttctttcgtattcttcaagggtttttgtttctagacctaaagtttaatcctttttataagctttgtgtttgatttcaaaaccctagctgttccggattctattgtagaaacgattacttaaggttcaatcggaattagggtttgaattagaaccgtaacttcgtgtgttttttaggaatgatactacactgtcctgtctctttgtcacttagctttcacttgaatcttcgaaccagtagaatcggaaacataggagtaacaagagtcaacgctagtcaaaggaatcactctaagaaactcactaagaatctccgtaatccacgccgtaccaagcttcctcctgattttggtgttaatttgtttcttaggaaacccaaaattgaaccactagtgattgatgatgatgatgagcaagttcaagaatcagtgaatgatgatgatgatgctgttgtatgggaaccagaagaaatcgaggctatttcatcgctgtttcagaaaaggatacctcaaaaacccgataaaccgagtcgagttaggcctttaccacttcctcaacctcacaagttacgacctttaggtcttccaactccaaagaagaacattatcagatcacctgcattgtcttctgtatcgaagcaagtgtataaagatccaagctttctcattggtttagctagagagatcaagagcttgccttcttctgatgcagatgtctctcttgttctcaataaatgggttagtttcttgcgtaaagggtcactctctacgactattcgagaattgggtcatatgggtttgcctgagagagctttacagacgtatcattgggctgaaaagcattctcatttagtccctgataaccggattcttgcatcgactatccaggttttggcgaagcaccatgagctgaaactgcttaaattcgacaatagtttggctagcaagaatgtaattgaagctatgatcaagggatgcattgaaggtggatggttgaatctagctcggaagcttatactgatctcgaagagtaacaatcgaatacttgactcgagtgtttacgtgaagatgattctggaaatagctaaaaaccctgacaagtaccatcttgttgttgctcttcttgaggaactgaaaaaaagagaagatttgaaattgagccagcaggattgcacaagtattatgaagatctgtgtgaaactgggagaatttgagcttgttgaatctctctttgactggtttaaagcatcaaacagagaaccaagcgttgtaatgtacactacgatgatacatagccggtattcggaacaaaaataccgggaggcaatgagtgtggtatgggagatggaagaatcaaattgtcttcttgatcttccagcttatagagtagtcattaaactatttgtagcattggatgatttgggaagagcaatgaggtattactctaaactcaaggaagctggattctcgccaacgtatgatatttatcgcgatatgattagcgtttataccgcttcagggcgattgacaaagtgtaaagagatatgtaaggaggttgaagatgctggattgaggttggataaagatacttcatttaggttactgcagctcgagaagcaaacaatgtctcttttgcactgaagacaaagttccaattttgtttttactatcagtttcatttgtgtgaacatttcagtattgaaaacagtgaagatgtaatatacacgagatacactaagatttctactgtttgaaagtgttttcaggcaaagatgaaagtggaaacttaacaatgtcagaatcagacatagcaacactgttttcttctggaactgattctggtccatccatggatggttttatcactgtaatgaacaaaatgttgtagaacaaggtaagagctaagagaacaaaagctgaacttgtgaggaacgatccggagatctcaggtggttcttcaaacatgattggatcattgttggttctgaccacatctgatgatgtcttgttgatgattcttggtttctcatcagcttgagattctatttgttgatcaagctgtttcagagcttctctagctttatctctatcgatttggaatgaatcttctctttcagtggcttggacaatacgcatcaaatgtctcttcttctttgtctccatgattcttccatgtgtgtaccatttaagagactgtaagcctaacaccaccaccattatcagtttcctctgtttcttctgctacaccactctggaagatgatatttttttctgtgtggacattgttgatggcaaagttgtagataactttacttcttagggagttgtttttacataaaagtcttatatcaccagacattcaaaattgggcccatttttaatgtgataattccaagtataaggctttaaaggcccaattttagtcccaaaaaatgtattatatttcatatcaagtatttttataattagaatactatgaaatttaatattttcttaaaaggtatataagagaaatactatgaaaaacagctgaataatagaatagatgaatcacatttaataccggacaacaattctaagctgaataaaaatgattttttgtttcaaacaccataaagtttttatttcgtagattaatgaactttctaaaatttagtaataattttaaaacatgcaagataaactgaaaattcgcttgttattttcatattctatatataattaaacacaagtttttgtatagccctgggtatgtggatatttgggtcggttcgggtcggatcttttgggttctaatttagaaattttagactcgttgggttatatgttcaatttcgggttgggttcggttcgggtttactttgggtccgcataattcgaatattggttaaagaacccataaataaccaaaactatttcgggtttaagtactacttacccaaattttgttcaaatataccgaaacatacataaaaatatccataaaacccaaaaatctgaaattataacaagtttttctttaagacaataatataaaacaagaagtaaaccttattttgagcttgttccataactcaaatcattaaatatgtcacaaattcaagttattagtgaatatatgtcctatatgtatatatatgttcgagtaataaatattacttacgagtatcgggttcggttcggataataccgatacctacaattatttgaaaatagaatccgatcggataattaaccgaaactgaaatagaacaggttcgggtatttcagatcgggttcaggtattatgcccatgcctatttttgtaaatgatatgtattcaacggaaccacgttttcagaacgtgaaaaaactctatattattcaagaccattgtgttcaataatcatacatcaataaatttattgtaaataaaaacttaaattaaattgtgtgcaaattttattcttagaaatgttatttaaagatgagcagatcttttggacaatgaggatcggtgaagaacattgccggaaacatcatagtagatgaatttagctttggagtgagtgatgtgaagagacatgaaaccttgtccatcgtaatacagtttgagttcttttggatcccatggctgaacatgtcctctccatgcctttgatcctcctccacttgtaagaaattgggttttacttcaccatttccaaaatatatgttaagttttctttctttcaacaaaatataacaacttaatagagaaagaaacattttaaactcaacaaataagtacttataattttacccgtgagaaccaatgtgttgcaagcagtgatcatgtccatttatgtacaagtccactttattctccttcagtaataagtgaaaaaaatcatgaaaaactatcgtagttaattaaattggggtacatcaatgtagaaaacaataaagataatataacatgtaattagcataaaagtgatattatgaattttacctctagaattggaagaagttgatctacaagctcttgagtcacaccgtgattacctgcggttttgatcccgtgatgtcccacgacaaatttccatgtggcacgcgactttttaatctctaaatctaaatcctgatatttcaataacataagttataattagtagaaaatttcaaaaagaagattgagatatatatatgtgattatgaaagaaaatgtattacatgtaagaggtttgagatgtatttatttcttggtaagacatttctccaatcataagtgtgatcttctggttcagtgaagtatttttctacaaaaggatttgtgtccgcgaagaaaaaatccaccattcctataaccacaacaaaacatattcactaactaaaactttgatttagttatgatagtttaattttgtttgtttctttccttaaaatctacctgaggataagacaaaagatctgcgacaaaaccatctccaatctttttgggtgagaactttacttagttgtgcttcaacatttcctctgtaatcatggttacccaaaactgcattaacacatgaatcaatatcagattttgccatttttcttagtggcatttatagattttgccttttttgaatagtttatggattttgccattttgcaagctaaaaaattataatttaaacatgcattttacccgttatgtttaggtcagtcggttccatctgatcttaagtttagtatttggtataaaatatgtatttttaacaacaaaaaaattgaaatacgtacgacaaatctgtaagatcttagtaaaaatgacattttccaaaacaattgcaaactacacaataatcccataacacatttgagtgtttaaactcagttaggcatatagataaacaattaagtaactaactattaaacatgtgtataaactttgattagaaggaagtaaattacctgaataccattgtttttggagactaggatgagtgtagatatgagagaaagaggcttcaaaggaaggatcattgactccttttaatccgtcgtcgtagaaattatctcctactgatatcacaaaatctatgtctaatttctctcccacaactcccatctgccaatttttcagttttacattacataaacaaaattttattaacactggtttgttcatgtcgatattataagcgtgaaatatttttgtaaattgatttaagatatacaacaaaaaaaaggatttgttgccaaacaaaatgatagtcaattttctgttacatctcattttaattaggattctgctttctaatgaagcgtatcaatttgtcaattacaagaatactttacgaatatgctttctcaattagtacttattgcgtaggatgcacgcaacatacgactatgtactcataaattaatagattgatgtttacattttcatacatatttcaactttcaacactataaacaatacgtacattgttcaacaaaaaaaatcaaattcaaatcctttgggttgtattactctatattgttgccttgaacaaataattgtcactaattaagttgtatttttgttattcaaacgaattataaatgaaataataaatcttgtatttttatcagatttacaaaacacaaaccactagtctacatatacttgttaaatctttctaatacattataaatattgaaaaagtgattaatattactaacctgatgtgcaacgagagattgattaaaaccacctttgcgtccccaatctccgataacaagaaaactcagagagccatcagatttcttcttcaccggatgtttcaacctttcaagcttcgacaaagcaccattgatgaagaagatgcttagaaacatcaaaatcacactaaaacatacgtgcatcttcatcttcttcttactttgttttatctggtatgagacaaaatcacaaaagaaacaaatgatgcctatataaagagagatgaagatgccttgctaacaattaatatagatggatccataagaagaacatggtcgatacattatttaatcaaggatgtttctttttggtcaactcttgaaggaaattataatcattttactaaattaattaagaagactctacaactttttgttttgtaatcatatagtatatattttgttcaatgtatgggccaatgctgcgtgttacttacacgtttaggtcaagggatatttcctcctgtatatgtttttatttgtttcctactttatttcttaattatatatctttccccataaatgtctaatattaatatctctcggatatttgatacaaatgtataaatttggtatccatagttttaaaaaaatcaaattagttgtcttttaatgtttaaatcataaagagaagtattaaggatttctctctttatgtgaaatatgcaaaaataattcttttgaatatcaatatatatatagtggaatatgatggtaatgaaaaatgtgaacacgagaaccatgcgtacagtataattatatattaaacaagattttaacccgcggtataccgcggcacgatttatttttaaaagtaatatatattaaaatttgcaaattttatttttacaaaatatttatattttacagtttataattgtaattaagtaacgatataccacgaattcatgagacaattgttaaaaaaactgaagttttgacccctattaaaacagcatattaataatattttaaaattttataaatattgattcaaatacatccaccatataacccaattccaaaataaaacacgttttgtaatttctttacccgtcccatgattttttttttaagtagtaatttttataattttagaattattttttatatataaaaattttgcaaattgtattattctctaatacatttatattttatagtttaattttatatatagtaacattatacataccacataacatttttggttctatataatttttctaaattaggatgatttgatatgtttaatattagtggtcttaaaaaataataaattaaagatttaacccatattgaaacggtaaattaattatattttacttttttattaatgttgattcaaaaactcgttcctccaaatccgtcttgccaaaaagtcatttattttattaatattagttttattaatgatatgactctgaattataatctaaacattttagctaataacataggagtgcaccatatttatttaatagaggaatgtaccatatgacccgaatgcatttttatccaaatccaccaaaaaagtcttgcaaaaatactatagagataaaaaacgatagtcggttttgatagatataagattagcaaatatattagttagcttaaattagttaaagaatacaaattaaaaaggtatattacactttattcaaatatagtatcaaaacttatataacacagagatttgataattttttaattgttgaatacttttttttgtgctaattttatgtgattaagatttaattgatttcgtatatataatattaaattgacttatttgtttataatttggtaacagatagatatttgaatattcagtatattttgcttcagtttaggaaatctttgatgacccgtctttagatccaataagtcctataatctagagattaatctgcagtataccgcaggtaggcttatattttagttaaactaaaaacttttattgtaaagatgatttaaaaatatataatattattttatttaattttaaatgtatagtagactgtgagttgtatatgttttgttgatattatctatattgtttagtgtttaagattatacacttgtagtttgattgttaatttaagagtttcacatgtagtataccatcttgtattaatatcgatctaaatccgtcaattctatgattttccagcttgtattaaaaattgaatcacatctaatatgttattaactattgtagtatataagattataaattttcaatataatatgtatgaaattgaatatatatatttcaaatttatgtcccgttactcagtagaaagttttcttaaatatctttttcacccgttataatattattcatgtattgaacagtttatattcgtttttaaaaattcaaattatggcatatgcgaaaaaactctaattatttttttataatgatgatattatttttccgtaaaaatagaatcatatcaagatgagaagtgaactataataattaagaaaaaattaatatgataatttagataccaaatatagtttgttgattttaattggctacttttttggaaattaataatgtatttcgtttttctaattaaattaaattaattaaaatttagatatcaaatcttatgtgttgattttgattggctattatttttagaaattaataatgtattttgttttttaattaatttaattaattaaattagtatttgactttttaatctttaaagaaataaatatataatattaatatctctcggatatttgatacaaatgtataaatttggtatcaatagtaaaaaaatcaaattagttgtcttttaatgtttaaatcataaagagaagtattaaggatttctctctttatgtgaaatatgcaaaaataattcttttgaatatcaatatatatatagtggaatatgatggtaatgaaaaatgtgaacacgagaaccatgcgtacagtataattatatattaaatgtaaacgaaatcaaaaccaaatcatgagaagatatgtctccatgtattaagataccattaagaattcgaaaataatcacacaacattaaaaaatgtttaactcacatgaaatatcaacataataaacaatggactaattaatataaataattatgtcgtaactcttaactacttttttgtctgaccatcgattagatatcggaataaaccccattcttaagagtgctccatcgatgcaaaacgtgaccaagaccatcatagaaaacgacgcgtagttcagcttcggatgtgtaaaccgacatgaatccttgtccatcatagtaaaacctcatctcttgtgggttccaatcattcacatctcctttccacgccttggagccacctccacttgtcataaattgtattccactataaacaacaaaaaccgcatctctatcttacgttactaatccataattaatcgattaataaattatacaaacttattataatcacctgttgatgctgcttatgtgctccaagcaatgatcatgcccgtttatatagagatccacttcattagcctaaatatatcaagaaaaccaattaaattgtttttttttcaatttttggtattacataattcagtagtttataatatagtaaaaattacctcgaggataggtaaaagttgtttctcaagctctatggtatttccgtggtgacctgcacttttgatcgtgtgatggcctaccactattttccatttagccattgattcttgcaatgccacatccacatcctatatatcattaaattaggtcaatgataatcacatattttgactatattgtaatcgagacaggttttagtatgatgccaatttaattattctaattttcaatgaatttgatgatatgactagcttatggtagagtaagaaaaaaaaagttaccgttaagagactgttaaggtatttatttctcggtaatacgcctctccaatcatatacatggtcctttggttcatcaaaatatctatctacgaacggtgttgtatccacgaagaaaatatcgacaatctctacaaaagaaaaaagggttaactaaagagaagttttattaacttgtgttcttggtaatttacttaccggcgttaacaacataagatcttaaacaaatccaacggcagtccaaatccctgagtatggggctgagttgcgcatagacgttacctctataatcatgatttcctaatactgcaagagaaaataaatgaaaatctactaataagtatataaatttttgatagtcaaataactttttctctgtaagtgaaagagagatagttttatgctcagagtataaatactattaataatttacttaccattgtaccatggtttttgtaagctagttgctgtgtaaatattggtaaacgaatcttgaaattgagaatcatatggactgattattccatcatcataaaagttatctccagtcgaaatgaggaaatcaatatttaagtccttccctatttttcccatctgatcaatgcaaaaaaatatagacaataattagaaattgctagctgcgacaaacctatccatttaactacaaactaaaacaaaataataataataaaaatctctagtcagtgtcttccttaatccaaagcatttactcataggattatagaagcaaccaataattaaagtgatgacgtagaattgcaacactaatggacagccttaagatgattattagttccacgtaagttacgtaatgaactaaagattatgtatgcaacttcatcttcacggctccttaattaacaatgaaatatgcctcatatattatcatcaactcactcattatatattcagatattattacatgttaatacaacccaggcattactcagtgcagttttattattattgttcgttacttgctaatatataactacaatagctaattaatttgtaatttactcaaacgatgaattcgacgtcaagataacatatatatgatttctcttatcattttcgtcttctcgcttgaattctctcacatattttctaaaccacaccattaaaaagaacttgaaactagcttaattacagacaaggaataaagtttgattgttcataaaaataaggtcatatctacataaacacacacataaatatgtacctgaagagctacttgggactgattataagaacctcttcttccccagtcgccgacaacgagaaaactgagtgaaccatcgggttctggtggttggacgaaccgcggtagctctgccgttgaattacaggcggatagtataataactagacagaaaatagaaaatatgagtttgataggcttaacatctctcaagctatccattgagagactttggagaaaaaatgtaagaggtgatggacctgatggtgggttttcgtgtggctttgtttatttatagctagtccttatgtggacaagaattaaaaatagaaaaaggcaagagaaaaaataatgtaatgaactttgtcactagaaaaataactcttcaaaataattaataaattttaaagtcgaaaaaattgtttttcttgtttcaatccgagactatataagactaaaatggactttagacaattacgtgaaaattatttgcacgtcaatgaaaaggggcggtggatagaagtagtctgaatattccatgtttaggtaattaacgtggtatatattgttccacatataaataacatttttagttcccatatatattaacaaggaaattaaagagaattttgaaagaaaaaaaaaaaaggttgaccggactttttgaaggtgattttatttatttatttgctaattgccttacatatgtgaaaggccattgtacgagttgttaatttatacacaaaaggtttgattcataatttttaaaaaaaaatctgtttgtcataaaactttgctacaaggaaaaaaaaaattcgtgaataatacacaagtttcgaataaaagagaaaattgttttttgttttccttttccaacaaagattatttgattatgtcactggaagagtgacagagtcattatacaaacaaatatgacaaccatgaaggagctaggaacctcctttatagttttaaaactgttataatttataaagatacaactaattattaacagtaattggaaataggcctctgcaccaattggaaatgtttacttcctcgtttaaacttaatgaaaatagtcgttgtcaacatcaaaaattatttattgtcagttaaaaattcatatttagaagcttttttggttcattggttgaccgaaggttcattaatgcttttgtacactaaaaaagtctggggttcgagtcccagatactgtgatttattagcagatttgcagattggtagagacaagtgtgcaggagatcttcaacaatgtgcaattatatccattcggctatgtaacaattctcataatttgcaataaataataaatttaagacggtaaaaaaaattatatttttttgatagatatttattcatttttaggagtttatcagtttaattccggaattataagataaaaatattaatttatcatggatgtatatttcctccaccatccgaagtcatgtcatacaagccaaacgggaacccataccatattcttctttaagatttgcaattattgaaatttgtgttcatgtattgtttttcttatctagacaagatccaagaggcgtcgactacaagaatatccaaaatgcatgtgagagtcgacgaaaacttccaaaatcttttcaattattttgagattccatacatgaaaatacacatgcgaaaataaatagtatccacgtatatatgatgtccgatctatccgaaatctcaaatgagattctatgcttcggaatgatatgatcacgagcgcgtatgatataaagtatgttgaaacaaaagaatgtatataaaaattggtaaagagcatcatcatatgcttaagcaatgatatttgtttagaatttctcttctcttttgtttgttataacaattactttaaccaacggaagcccaaaacaatttgtagtagttaattagaagccccaaatacttggtcagatcactaattggaagtagaagcccaacagtagaacaaatgtgtagttgcttgttgaaagttgaaacagattttgagtaagaagaccaaattaccaaactcgttttggttagctttcattgacttgaaccaaaattgttttcccactcgaatgagctcataccaataaaattcaaatagactgtataaaattgatagtatggttaataagttcgaataaccttttcccattttctcttctgatttccattgtgttgttctcagttttaccaatatgatataatataaatcttataatttatgttgatttatttgttatgaaattaaaaactcacaattttggtaagattttttatttattaatttttaatagacaatttatcacttatttttatttatccaacttatgtgttgtttgaaattagtttattcaacaaatttgcatacataaaacaatctttagttttccatcttattattttataatcatgattatgtttgaatttttccatgttatatatatcttctggatcattaaaacagtaaaactataatgaatattgggttgcatttggacatttggtataggataccaaacttttacaatccaaattaaatatgttataccaaatcaaatatacaattaatgttatatgattaaaaatataaataatcatgtatagtgcctaaaaggaatttatgatctcagtggtcccaaaatattaatgaaattgatgtagcgttgttagcttaaccactaatagctttttacgcaaatttatctacctcttaataagtactgtatttttacaatccataattaagaactactaaatatctctcgaatgaaagtaatatgtaatgcaatatcggcatcttagatatttataattggacaaaagatgaagaagatatttgacataattttttctaaagtatttgcactttctgtctaattagtaaatatcctctcggctggtaggaagaatttaaaattgtacgaaaataatcaaatattgcaccggccagccaatgagattcaattcaatatatataaaaaattaaattgatcaaagttatactaatataaattatatagacatatagtacgtatagctattgtctccttaaacttgacactattactaattgtgtaaaatattttggtatttgacaggtatctatcgttcacatatatataggtaacaatgtgaaatgacaaatcacataaataaaaatataccaaacaacatgatataaatcattattgacaaaaacttggctagaagtttacaaatgacatttttagatatatttattaatttatgaaatgattgacataaattgtgacacaaaacttatgcaacaaataaattggtaaacttgcaggataaaattatttgcgatgaaaaaatgcaatggttacatatacagtatttgtatagattacactcagtcaatataaaagaaaaaaaaagatgacaaaaataggaatatttgaccttaattcagaaccccaacaattcttaagattatcttataattttttattattttattattatttattatttacttttttattatcttataatttttattgattattggttatcaatattaatagacatgccgcaaaaagaaaattaaccaaaccctgccttgcgacaattgaaatccaactttcttggaatctttgtcaagataccataatctttgttttttctcaccgggaaaatattgaagaatctatttatttttaaggaatcaacctattaagaaaaactatttacagtactgtatttgcttggttaaacttatcgaagcaaaaaaagtagtagattgattaagataatattagggataatgttccacatcggaagttaagtaggatcttaagtggtatatataagatatgggcctctccacctattgccaattagttttaggttggaagcccacactctaatatggtatcatagcccgatccgtacatactcaacccgatccacatcgatccggcccaatacttggctcgccgatccatgcccaaacatatcgagatcaatggctagaagagccatcatctcgagggggcgtattaggaacaatattccacatcgaaagttgaatagaatcttaagtggtatatataagatatgggcctctccacctattgccaattggttttaggttggaagcccacactctaatagatagaagcttcgataaaagaaaaaaacaatcaagctatttataggtttataatcttatcacaataaaacgaatgcagggaataatggacaatttgtccggttgtaatctaaacattaaacaatgaactatgcttctaattatatattgttatatattttgaaacaaataaaaggacgacatgtcgacatgtgcattataatactaaacaacatctattttctttacgacaagaatacaaaatacatagaaacactgaaacgttaacatatacaacttacacacctgaatgtttctacaaggagatgatcttagatcagtggtaaaactatattttctttttttatataattcttaacggttaatccgataaaaatatatagaagtgtttcagaatagacttttctttaatatcagccgcctatatttctgactagcattttaaccaattaggtcaaaaaacaactaatagattttctaaacaaatatgtttttgttttttcttttttttttgaaaaatacaaaatgtttttgttttcttttagtcttagtgaagcaagggttgtctagaaccaatttgccaatttgttgttagtatataattttgatttacatcattgtaactgccacgtgttgcatccttacttagcttgtctaatatgtcctaacaatacaattctaccataattttctcacaccccttaaagaactttttgactatataattcaaaagtatataaaagtatgaaactaattttgaacaataaaagaaaattcatatcgttctttttccttgttaaagtaaaaaaataaaaatccagataatatttctcatcatgtaatgatcaacaagaaaccaatttaagactgctaaacatcgatgattaatgctgaaaaaattcttatcgtgaaactgagactactaacatcgatgattacgctattctaatattcgttgagacaacccaatactaattatattcttgtgttttgtgtatgtatgcactgatacatataacatatattgatatatatagctttcgtggagtcaccattgagaatggttggatccagtgcaagttccatactcgaaacttaatttgttttcatgcaagttgctccataataagatacatttatttgtttaatagggcagcaatatttgctttgtcagatttaaaatattttcaaattcacaacagttaaacaaatattgccgtgataaatagtaattattagattaatttttattttttacttattttagtttgaattgaaatcttgatccatactaccaacaaaaataaaccactaactaacatactacgtgtagttatttttaagttttcatagtttattttgttatgtattaattacttttaattataagtgttgattcgatattttctgaggaaatctatattaaaactcaattatataccatatttatttattttatttaataaaactataaattcttacaattttataaataatacaaacttgtgttttaggaagggatgttaaaactttatggttcttttggaatttttttaaaaatcaatggtagttttagaaaacaaaatttaaatagtactatttgcgacctttgatatatcaccctatatatatatatatatatatatatatatatatatatatatatatatataggtcatttgataagaagcttacgaacaaattatcttctcgtaacagttgccattttagaaagaaaaaaatcaaattccatctctcctactgccaattggaaaattaaaatcttattatgcaagttactaactcctctggttagtacatatacgagttgcataacttactgttattgttctttcttagttaggttagatactattgcagagtcatgtgcttctgtgtactccataatatataatttgagggacctattaaaagactaacaaaataaaactgttgaaatgacttgcaagttacaaacagagcaccaaagtgatacgacgaatatttcccatacaatgtcaccactagccatcattattggtgaattgattagctgctcaaattataagccgaatagagaaattaataatatcgagattaatatatcgttaaacaaataaaagtaagcctttgaataaaaatatgtagaggtccacagtgattagaccgaccaaaaaataacaatatttaatttcactgctataagaaagtttatgacataatgataagattcaaagaccaaaatagtagaattctataattagaggaaaatactattttcttttctcattatactatacttgccagcccattttgtcatttatcatgaaaattaaattgttttacatatcttcatttaaatgtttatagtaacaagttggaccctcctcgttatcaaaggtaatcgccttcagtgtttaataaagtaatacgattgaggacacaaagtgaatggtttaaaattaatttccgtgggatttaaagacgaatacaatgtgatcaaggtggtttgacgtctaactatagctagtctaaactagctagctaggctaacaaccagtaataatagctgaccaatcatcaacattcatttctttggatttaataaagaagctcaataacatcgactgactaattattaaaatgataataaaaactatttagtataataatcgtcgtccacgtcagagtttcacctctttctctccggctttgcatggctctttgtttctccttatctccctcccttacctattatacttcctctacaatttcattgcttcttgataagagctctctcttctttctatctcttgttctttaatttgtctctctctttttctctagcaatgcttggaagctatagagaagtgagtattagtgtctctctctttactttcactatctctgtttagatgtgtgtgtcggatatataaccggactaatatacgtataacttatagttattctatcttgaccattgatatatgcgaatcactctatggtattaataaggttatgtggccaagacttgtggccaacaagatcctaaggaaaagcctcgggagcaacaacttcgttgccgatttcccacctaatactgatcagaagcttatagaagcttccggattagctgatgaacgatctaaatcaattctccacaaccaacacaaaaccactcttctcaactacaagtacgtaatacatttaccctctttgatcacattttccttaacaaaaaccagttatcttcgtttatattgttaatacattgaatacttgggcagagaaaagagaggatcacaataccgttttattgccataattagtcacttttcttgcgtcgcactgcatttaaacctaattccggatacgcataaaccagtagagcttaacacgtagatgacaaaattgtaatcttaaggaaaccttcatttgattcctctgtgttccatgagttacaatgtttttaaataatgtaacgttttctttttcaaaaaaaaaaacaatagtgtaacgttttgacaatttttgttttaaatttaattttaattatctgtttctagggtttttgtaagcacatggaacgtgggtggtatcgtaccggacgatggacttgacatggaggatctactggaaacacataaaacaccgtgcgacatatacgtgcttgggtaattgataaacactacaataaaaaattgaatatatatagttatataacgtgtggattttatgtctaaaatttagtttaaatgaaaatctaggtttcaagaggttgtgcctctacgagcttcgaatgttttgggatcagataacaacaaagtctctacaaaatggaactctttgataagagatgctttgaacaagagagcaagacctcatcgagacgaagacttgtcggaatcaaagggcattaatggtatttcacaagattttagatgtatcataagtaaacagatggtcggaatcttgatcaccgtttgggtccgaggtgatctctggccgtacatccgttatcctagcgtttcatgcgttggttgcggcatcatgggttgcttaggaaacaaggtaacatatatttagaattttctatctttttaattatataaaatctcactgttatagatgtggactgatttaggtattgactgtttatagaaaatgaatacgtgcgtttgcatttgtattcatatctgattattttaatttgtggttgaaaatgaactcacattatgcatctttgactaagattatagcataatgagtttgattgataaccaaaagctgtacaagttttttagctgttatctaaagttcttagctttatcagaatagtacaaagctgttagaaagagccgtatagaaaagttgttaaaaaatgctgaaagtaaaactttttataacgcttttaataaaaaatttgtgattggtaactgtcaaaactgtatacactgtttaaaagtgttaagtggttatcattcaaaaccaatagttaaaaaaaatatatatatatagcataatagtttgtacaagactactagttaccaccggcatagcctaagtttaattagcctggaattaggtaactaatatttgcattttgattaaaaaaataggtaactaatgttttgtttgccccgtataatttaaactgacttcttacatttttttttctttcttgatcaatttagggatcagtatcggttagatttcaattgcacgaaacgacattttgtttcgtttgtagccatctagcttctggtggccgcgaccgagatgaaagacagagaaactccgacgtcaacgagatcttagctagatctagttttcctcgaggctcatctctagatttacccaaaaagatccttgatcacgagtaagcttatgttatactataatttttcaataatacttggttcatatattttgtgtacgtaaattaaaatattccaacttgttagtaattaactatatcccaaggtcagacaaaaatgattataatgttaaatagttgaccgattaattataataagacttgatattgtgaagtgaaaaggctagtttggtaagtacttattaagaaattaccaacttgtggtattaattaatttatttttgttttgtttttgttggatcaaattctatagtcgggtgatttttttgggagacttgaattatagaatttcattaccggaggagaagacaagattattggtggaaagcaaaaaatggaacatcttactagaaaatgatcaggtaattatttatatatgtatttttttttacgtgttgaaagttgtaaactcgctattattttcttatacatatatatgttttgttatattaaaattaagctgaggatggagatcatgaacggccagattttcagagggtggcaagaaggaattgtcaaatttgctccaacgtataaatacgttccaaattcggatttatattacggatgcattacatacaaaaaagacgagaagaaacgagctcctgcatggtacgtataacgtattataatttacatgatacttatatcatatatttaaataaaagtttgatcccatggatgcatatatttaaataggtgtgatcgaataatatggtacggaaatggactgaagcaacatgaatatacaagaggagaaacgaagatatctgatcataggcctgtcaaagcaattttcaccacagaaattactgtaacacggcgtggtaaaaagattcgtaatttctttttctcggacagatttgaagaaagaattggtgacatagattctaaagactactcgtggatatctacatagttttattaatcggggtgatatcttgtcacttgttaatatacaattcacatagattttatataaaaaaaacttatacatatggagtttttgttttatacatttttagttcttagcagattttagattaaaaaaagcttataaaagttgtgtaataagagaatctatagaagaagatttgttaaatattgattatttatgcaatcttggcgacaagtgacagttgtatacttgtatggtaaaatattattcatgaatttcgagttcttacaatgcttatgcaatacgtttatgcagttcaacaactatatggtccgcagttatattattcttatttcgataaataattttgttgatgcgattcgagataacaaaatcagcatttattttgttcgagattaatttctaaattctaaatataaattattaagttatatatatcatgcaatagcatacaagactaatacttaaacaacaaaacaaactaaggctgttgaacaagccatatggttggttaatttggcaattggcattatatgtggacatgaggctaggagcatgaacaatttgggggtattttatataatattatataatcatattttattttatcttgttttcgcaaaacaaatagatatggttttgttaattataatggcaagtggttttagtaaatgcttgagttgttgtcatttgtctaccaaaattttagttgttggaaataggataatatcaaatatgaatatcgaatgaactttttttagtataaatgggaaaaatacaaatgcaaaatatctcattactaataaacaaatgaattgttgtaagaaaaagggaaaaataaaatagacaataatctctttaccaatacaaaattggatcgttacaataattttgttttcgctaatccataattatgtacttgcaaaataccaacaaaaaattcgcttatgaaaattatatttttagtggacatatctaagataatcagaaaaataatcaatttcttcaaacacaaatactgtacatctaaatgggaaacatacaaataaaaaatatctaatcagccaatcaccaataaagaagtgactcgttgtcaaaaattagggaacaaaaatatctcattaccaataaataaatggatctttgtaagaaagttaaaaaaaaaaaaaagacaaatgaatccaatgttccactaaatcactaaaaaaaattttgtcgaaaaaaaataaaaaaattgtatattatttacttgcaaattgcgaaaaagaaaagaaaacttgggattatgaatatcaaattgtatattgggcctatttaagataacgagcccaggcccatctaaatgatatgaaaatgaaattatcggcatttcgagtttcagcgccattgaaacgtttcaaaattttcacggagagctccaaaatcagagagagagagagatgtctacagagatcggtcatcttcgtcggagattagtcgagttcttgattcaatctactactgtaagtttgatcttcttcttctcaatcgttatctgttgatgttttttccctttcacttcaaaattttctctcctgatttcttcaaaaattttgtttctcatcgtgaaagctactcgaacttcctccgatcgttaaatattcagctctatcgctattcttcgatcgatttcgtcctaatttagtcaggtattaccattttcctcttccaatgattcctgatttgagtaatttttagtgaattcgattgattttagggtataattgacgaaatcggtaatcaatgtcggtgtatatatttggatcagtgcttgttttcggaggattgatagatttacgatgtgttagtatttgactcgagatcaactaacattaggcttatattcatgttggatgatttcataattttcagtttattagctttggatcaagtcttgtataatggattctagagttatggtgaaaactatagtcatgtttgtgaatctttgggtttataggtttttacagaaaaagaaagcagaacattggctattgcaacctttgaatgaaagcaatctgcagttatttgtgttaatctccatttggatctcatgtaaagtgggtctacttctttgcttctgctattgttttttgtgtgtttgttctcttatatgtgtacctagaactgaattgtttgcttctgcagatgcattgtacacgaggtttatcggttcatagtttgaaatcctttggggataaagtgattactgagcaactcttcatggttcgcgatttcttggatgcagtaagatagtcttgaaaaccttaaatctgtgactgaattttgtttgatgctttcaatgagttttgaggtttcttttgcaggaactggtttttctgaaggtaaccattgtacacttgtgggaatgttgtttacgctatagaaggctagaagctcattcgaactaaatgtctctcttcctcattgaacatgaggagcaggttctgaaatttgagattggcactctaaatatagcttatacacggcttgaagatcttcttattcagttcaagtaagttgtttcatccttatcaagtatctaaagtcttaacgctcctgaatgatattgtgctagtccatgttgttattatctaactccttaaccatattttcttctatcagagaagttgcaaaagttggggaacagttgaactttgaagcatgtatggacatgatggatcttctttacgagaaagaggacacatcccttctttatcaatcttcaaaatctctggctgcttccattttggtaaacttatttgctctccattaccctctgtttttttttccttaattgctctccattaccatctgtttgaatagacattaaaaatgaaactaaaatggtgttattctcttggccacaggtctcttcttacataataacagtgcctaaacagcagtacgaattccctattctcccctggggtaagcattcatctttctgctctttctatcaaaaccattttataaatacaattaccaatgatagatttatattaatcaagtcataggatactgaataagttagaaacaggttatagcatataggatcaataaggcccaatgttcacctttttgacaatgcatttcaacatcacaaaaaagagtgtcttgttcacacttcaaggtcttcttcaaattgccccttagacctggacattgtatgttcctcacctaatacttaattattatgataatgagcccatcaaggttgacttatcagttctgaccaccggccatatacgtatatacggtttacggatcaatcagatcttttgtggtccataacattttgctaaacctaacatatctccggtccggaccactcaaatattgtaccggaccgtataagatataggagacagtaatagtagaagtcactagtcaaacgtcagcatttcctttatcttattgaaaaaacatacctcattttcatggagttatagctgttacacactcacacacatacacaaaaagatagaaagaagaaaagtctatttctatttatttcttcgggtccctctccaaaatttattcttcttcatttatggagtctacactacattgttctgagatttgttctctatatactccttttcagttttttttcacatttcatggtaacaaataggatctctttcgaactataccaaattctagaagacatgatttctgtctaaatctttcacctactcttttatatacacatgtacatgttgatccacgtggtagagtctttagtataaagttaaaaaaatgttaggcctatcttatttatagggaccattgtcgaaactagaaagaagtagagtgaggtttctaaggttaggagagggtaggcactagacatagttttattctgcttctgtgttacatgactctgttactagagaatagaaacaacaaaaatttaagacttggaggcaatgatgaccctaatttttatgagtaggggatgtatagtttaattattcatcaatattatttggccctacttcgaccacctaccattttcattttcagtttgattttcaaaaaatggatatgatgttgtgaaataacaacaacttcaaataagtatttttgaaattcaatagatagcaaaagcttccattgagatttttagttcttgggataatgacaaatatgagctattttcataacaaactttaaaatttttctaattccattttatatttatgttatcttgctttcacttaaagctcgattctttgtttgtttgtttaagaggctcatacataaaatataaccagaaatgtacaccaaagatgtttgttgagttaggagtagtttccaaggagtccttttgagttttgagtaacagtcccatcttaaattgtctctttatcttttttaatatgatgattatgaattttgtatttttggcagttaaaatggtgacaaataaggaagaaagggaggtggtggagcttgttgaatacatacttgctcatgtcctttactcgaactctccttaaaccctacaggtacacgcatctttaatcccttcctatctactccttttttaaaaaacacaaattaaaatttaaaatagaaattgtatatatattttaaagatatatatgaacatgtagggtctatatacacacacacatgcttattatatacacatcaaatacgcattttcctacttttaaaatttaattttctcgccttcaaactgttttatatagatcgttaaatataaattccactatatcattatcacctataattagagttaaattctgcacaattagtgatagaactaacagaggttattcaattgaaaaaactgtagtagaatgataagtttttttgaagtatgaaacatcctaataaaaatgacaattccgcacaattacatcattgctataatattgcaaaatctttagagtcattccactcttgatatcactaaaaagttttgagagttgggacacgtgtattctataacgttttatgaaattttaaatcgtataaatgtgtatgtatatatgtaaatcggatagattgatcgatatgcataatacatgtggatctaatgatatgtgtatgcttcacaaggcaatgacggttgcgatgcgacataccatgcatgtgagttactagatccacttcgaaccatctaaaataattttattttcacctacataaatgtgcgaatttattatatcttctcctaaatgatattggtactttaactccgaatatttgtccttactgtacccacattaggctttgtcttctccaaataattagtttcactatttaaccgaaaaatctcacccaacataagagacaaataactaaagttgacaaaagaaaagacaaaaaaatgtgaaaataaagagagaaataactaagtttgcttggcatttatagatttttgtttgcaagctttctctggcggaatcctaacttcactgtaatatttactattacacaaaacaaatgtgagctgtgctataacaaaaatttcaataaacccttccaaattgtatagtttttttaattattattctcaaacaatcaataattcaggactgttgagttgtgaattgggtgtgccatgtcgatgataaaatccaaccactagataagtatatgattagatgatatgattagatgatatgattagacacttaatcccagtagcatcctaagggggttaagcacattattaaagtgattttatacctcttttcagtatttaaatctcatttagttttgttttgataaataattctctttgctttctactttatcaatcttaatatataaaacgaataatgtgattattagttaagtacattcctcttctaatagtataaaagtgattatgtttcttcataatcgtatcacgactgtatccagcacgacgttgacttttaatattcagtctcccacacatgcggtattaaattgggagatacagaaacaaatccaaaaaaaacaaaagttttcgtaaagattgttagtttatgtgtctaattctgttttattaagttacccaagcctaattattgagagaagtatatataaactactcccataattatttagatcatatacttaatgatagaatcatggaatttaaattgctacgaataagtcttatggttattgacttactgtataattgcatggaccgtattaaaaatttcattaccctacccaaagttgaaacctattctacttgttgttttctgcccaaccaccttaaatgttatttttctggttctttatgttaggagtttatgtgtcatcttttgtcttttaattccaaaaaattatagagatatatataattcagttaaacaaaaaaaaattaattagacacttacactgtagaaatatatggtaaaagaatttgaataaaaacttatgtatggtaaaatgatacgtatactaattttataaaattattaagcttgatcgttactcgtttataataaaactattttggtaaaacaaaatctaatatataatattgtatatgtatatatatacatataatgatttgcagcttgattagttggtacggggagcgagcaataattatgtttggatgggaatgggatactaaaacaaaagttgttaattaaattaatttaaaaaatagacatctacttttctcgatgaaactggtggagaagagcggtaatgagagagaccatacttttgattagaccaaattggcatctttcttgttattaagaggggtacatagtatcatcatcatccttaattaattagagtccacgcaataacaatagaagactctgtcctccccatttgtggtaaatcctcttctcatgattattgtttggttgagtatatgttttattctattactactcaccagaagaacattttcatatgtgattcgaatacaatgttacatttctaatatgagagataacatatgcacctactttttatacatgcagttgtatattgtgtgatgtatagttatatattttcgtctaatttctgttgagttcatatgtcatacctaatttgctataggattttattgactgaacaaaaaaaaatgtatacatggtctttatcttagaataatggatatatctatttcttttatttgatttgcttcgcaaatgtacgaatattcgatctttctaaatcgaattgaatcaaataacagatcgaaacaaatctaacgaatattttgtccaaccctaatattttttttaaaaaaaatgttagttgtttaattatattactaaaatcatgaaaatataataaatgttgtaaatgatagaaaaaaaaattgaaagaacgtttttctgaagagtttatataccttgtatacaaacatcttttaataaaaaaaacaaataattcatattaatggtgacatagactgcacccaaaaccgcagcgcaacagtgctgtaacagtattaaaatctttacatatacatatgtatctatgtatttttgttactattcgaaccgtatcgcactttttcgtaaaacgcagttactagtcagaaattaaaaatatataattttaaatgaaagcaaaaaattatcgtaaagtttacacttcaccgtcaaaacacagctacttatgtcagtgactcttcttctatcaccactacacgacaccaaagaaaaacactaacacactctctctgataactctcgcgtgactctcctccttcaactctaactggttcgtacccttcacgctccattaccggcaacgcgcttatcgtctggcacactcacccgcaccgtacccgtcgtcggtcttttcgccaatttatcgtatttttccgtgaaagagaataatataatactctaataaagtgttataataaattacaacgttactatttacaacgatttttaaaagaagctgattattatttcttctgtaactctcttctctgttgctctacctgttcttttctctctgttcattctcttttctttagcttaattcagcaaaaaatttatctttgtttctctcttttgtttctttcctctgcaaagtaaagttatgagagcttaataatgtttgtctcatcttcaagcttcagatctgattccttgtttctacaagtaattgtctctttctttttcgattaaccaccatttctgtgaagaaaacctttttgcttgcttcaagattcgagtgaggaaaattttagctgaaaatgctggaaattggaagtcccaatgctctgtttttccgtacgaatactacttgtaataatcttctccgtgagcttcaggtttgtttttcttcctctctttttgatttgttggtttcttgacgatgacggttgatgataaaaaaaaaagtctttgtttttttttaactctcaagggttaaaggattggactcataatgagtttggtagagacaatttaactgaatttttagtcttttgttttcattatcttttcttctcttaggtcaaaaggattcctgtgaattttgactaaaacatgtcagtttctggaaatttctttactttttttttggtcttcatgtgttgatgttctttggttttaatttcatgcataagctcttgtactagaaaatctctgtttttgtgttgtattgtgattgatttcatgagtttaatggggttttttttgggtgtatgaaacagaaaatatgggttgaaattggtgagactgagactgagaaagatagaatgcttatggaattagagagagaatgtcttcaaatctatcaaagaaaagttgatgaggctgcaaattctaaggcaaagcttcatcagtctgttgcatcaatagaagctgaagttgcttctttaatggctgcccttggtgtgttaaacatcaactcaccggtacatagctatcttcatgatagatcgatttagattgtgtgttttagcttaacaactattgctaaaaaatttgtgtgttttcttgcattttgatgttcagattaaactggataaaggttcaaaatcattgaaagaaaagcttgcagctgtgacacctctagttgaggaattgagaattcaaaaagaggagagaatgaagcagttttccgatataaaggcgcaaattgagaagattagtggggaaatctcaggatacagtgaccatctcaacaaggccatgaacatttcattgactcttgaagaacaagacttgactttgaggaaccttaacgagtatcaaacacatctccgcacacttcaaaaggaaaaggtaagagcaatgaacaacaaatatccatcatttctgttttcttataaacatgattatgttccttttatgcagtctgatcgtctcaacaaagtgttgggttatgtcaacgaagtccacgcactatgcggtgttcttggagttgactttagtcaaacagttagtgcagttcatccaagcttgcatagaacagaccaagagcaatctacaaacattagtgatagcacattagagggtcttgagcacatgattcaaaagcttaaaactgaaagaaaatcccgatttcaaaaggtagacttgtatttatatacttgtttgaacaatactattcttctatgtcatattcatttattgacttgtcatttttgtgttctcaataatacttctaaatctgcagctaaaggatgtagtggcttcactcttcgagctatggaatctaatggacacaccacaggaagacagaactaaatttgggaaagttacttatgttgtaagatcatctgaagctaatatcactgagccgggaatcctttcgaccgaaacaattgaacaggttcagtagaagcacttatataattctacatctacatctttaacctcgttcttgatttgagtctttgttttggttttacaataggtatctacggaagtggacagtctcagtaaactgaaagcaagcagaatgaaggagcttgtaatgaaacgaagatccgagttagaggatctttgcagactaactcacattcaacctgacacaagcacttccgctgagaaatcaacggcattaatagattctggtatatgtgattgaggtttggtttttttgaatagttggtttattcttgccacttcaacttgtttttaagcctagcttccttatgtttcttcaggattagtggacccttcagagcttcttgcaaatattgaaatgcaaataaacaaaattaaagacgaagcacagagtcgaaaagatatcatggacagaattgaccgttggctctctgcatgtgaagaagaaaattggctggaagagtataatctggtatgagaaccttaaaacaaaaaactcataaaagaaaaatgtattctaaaaattctttatttggttttaggatgagaaccggtatagtgctggaagagggggacatgtaaacctcaagcgtgcagagcgagctcgggttacaatcaataagatccccggtactttgctcctttcgcattatactagtttttgaagattaaatcaaatgaataattgtaagcttatacctttgtgtgttatttacttcaggaatggttgacactcttatcaagaaaacacttgtgtgggaagaagacatgcagaagtcatttctatacgacggtgtaagctaaaactatttaaagtaagtgcagagtcatgaactgccaaagtcctttctttgattcttgtgactactttttgtaggttcgattggttaacatactagaagactataaactgacaaggaaacaacaggaagaggaaaagaaaagatacagggtttgtcccaaaacactctcttaaaaccactcaagattttttcgttttcccgttttaaaacaagctctatatcctttgtgcaggatcaaaagaagaggcaggatctcctactaacccaaagggaatccatttacggatcaaaaccgagtccaagaagaagcagcagcttcagaaagcccaatggtttcaacattagcaatgggaatggttcagtgcctcccacgcctcgtagaggctcggtagggacaacaactcctgacgttcttctaaccccaagatcttactctggtcatcatcgccaaaacgggtatttcaaagaagttagaagactctctactactcccttaaactatgtggccatgcaaaaggaagatactgtttctactacctacacatcgatttatagctctgagccagactcgcctctccaaggctgacttgactctcttttccaccggtaagagaaataatcaaaactttaaagcatcaattgttcttgtggtgatctgaaactttgtgtagacagagattgatgttagaagttggatctatgatgcaggatttgtggagtaatgttaatggtaaaaaaagaaggaagtgaagaagaaggaaggagacttgtgaatacagaaggtgactgacttttaggagatatggtgagataagagtaaaaaaaataaatgtgaaatttgttattctttagaggttacaagttttctattttgaagtgaagaatactattgttttgtgtaatgccagtgtgaaagtgtgtgaatggtcattgttgtgcgtacgtatttgtgtataatatacgtatttgctatatttttgtgctttaaattagtcttgcttttgaaatttaaccattttgcgtgtacttaaactagagaattaagatggatagattcattatgtgttgctgttcagtttttgtcacaaagaaaaaacagagccaagttcatcaacaactatggaaatgaagttttttttctcgtactttagagattcatgcgtaaacaattcattgtattatgcatatttttttcattaaaattttactcaataacattgtgatcacttaacattgcattctctgttaaccttaacttgagaagcacattcattttttgttttgcgaacatctttggtttggttatacgtatttgctttgagctatgaagatgtgcgtatgtgcttctagtagagagctttagatatcacataaagcacatctttacttcgcaactcaaatcaaatgaatacgtaaacctgggcataatacccgaacccaaagaaccgaatcaaatccgacccaaaaatctcgatccgaatccgaactcgtaccgaagttcaaaatatccatgcagatcctaaacttcataacccaaaaacctgaacccaaacccgaaccaaacgcgaacaagtacccgaacatgcccgaaatataagtgtatagttaaatatattagtaatatttatatttgtaataacctaagtgtctaaaatatttgaatgtaaagttttttcgaatcttttaactacttttggctctaaaaagcactcgggtttgtagattttttgggtattatccaatagtttacatagactcgaatacaaaaattcgatatttggatactttgggtatactcgattccaaacccgaaatacctaatcgaacccgacccaaagctgaagttttaaaatatctgaacagattctagattctaaatccaaaaaaacttaacccaaaaaatcaaacccaagcccgatctgaatatccgaacgcctagacctataaatacgtattcctcttcacatgtttaccaaagacagtagcgagcgtaaaaatatggtgcaagtcagcaagatcataaaattgatgggaaaaaaaaatatatataacaaattatttgaacttagaaagtatagcccagttaagcccatatattgactttcataaaacacggcccattctaacgtaggattatactgaaaatgcccatgcactcataagaaactagaaaagtagaaattataacattttttaagctgttaaccgaatctgaccggaccggttatcaccgaataacaatataaataacaagtataccgaaactttggtactacatagaactactacattaccccaacataaacatctcaaagagatttgatattttgttacgactcgaactcctgaacttgttgaagaactcggtagaacgtgacgttggatcttcgagaggtggtttcgtcatcatcatgagatctcgtgaagaaattgttgttcccttccacgtcaaacgagttgtgtctctttcgtacgttacgtacatgatgacgtggcggtggataaaccggagtttcgtagctgctggctctgtgtttaacccaccccggtttcgatttctcctttggtttcttcacaatttaaaagctgtgatttaattggttatatgagaaatttttgatttggtgtaattattttcacttacgtggatgagagaagatgatattggtacgggacatttaaccggacgatcttcttcctccggttcaataggatgctcaaccggacaaaattcaacgtcgaattgattggtttcttcatcgtattccatcatcactgtctcctccacactctctcgtttgtcctaaagaaaacaaaacagataatagggtttccttttgtaatgttcaaaaattacggtccaaatttgtaaaacaaatgaattcaaagggtttgtttatatcaaaattaataagtagagtaaagatttggttaggagaggaaataaaaactcactgcggaatcgaagtccatgagagtttggtgaagatgaaatgaaatgagagagaggaggaatgtgaatgtgaatgtgaatgtgagaagagtttgtgtgtataaaagggtaaaaataaaagagaaagcgaagaggtaaaaaataaataaacaaaagttggttttggcatgaaaaggagggatttttaaccccacagtgaaaaaagatgtgaggcagaaaaagattccttaaccttccactattttttctttcttttttcaggaccattttcatatcgttcaaatggcgtatgggtgatcaaactttttgtagattgtctttttttttttttatattagcaatcggtgccaaacttcaaaacatgcattgtgttaatggagtgtataaaaagttacaaaacatatcacattacaacccttatataaccaacagcatgttggtcctgtggtaaattttaggattttctaggtggaggtgatgggtttgagacacgttgagagatatctttttttccaaaggagatgaatttaaccttttcggtcccgtctcttgaaaatgtatggattttgggcctgaactttcagatatttttaaaaaatatagatatataaccgctatatataaacaaattatcaaatatatatatgacaatcacaatattaatgtaaaagagtaaaacaaacaatttatttgtctcctttgtaaatcagtcaaacattataaaaaaatgtaatttttactgtatttgtggaattgtatcactattatgttcagggtctaaaaagatgacaagaacaactaccatatattatatacacttttcttgcttttaacaaaaggagatgctatctttctttgaaaatccgaacaatctttcgctttgtttcatgtcttactttttttttcctttcttctttcccttttagggctttgaagaagattggtgatgtagagaaaagctattgatttgctcgtattccgttaaaattacaaattgcaaaaaaggaaaaccaaaacacactaaagccggccgttaaggggaaagcatgaggtacaccactttgctttacttcaacaagccgtttttgtatgcgaatggaaaaagcaagcttactataaatacaccaatatagtctatataaaataccataattatacggtaaaatattagcggtatttctataagtagccacaaaattttcatacaaaacaaacattgttaagcaaattttgctaaataaacacaagagattttatatttttgcggctcgaactcgttaacttgttgaagaactcggtcgaaagtttaacaaaagaaaattttgctgaattacttatatactgattctgattttatcaaaggtccaacaatttgttatgtaaaaatgtatatatgaatctcgtagtgatttgaaaagagtgttatagggtaataactcctcggggattgagtttaagtaattagcaatgttttgaagtttagcttttttttttttttgaacggttgtttgctcacatatgctatgatttctttatgtaggtaggtaagtttcttaagatgacaagataaatcgtacaaaaaacatttgccaactttttctcttgtcacttgtattttcactagtgttttcttttggatagacaagaaagaacatgacaacaaatgcgaatcgattgcctaaactaatattatattgttcgaaattaaattcgagggaagatatcatcgaggattgcaacaatattaatatagtactccaacaccttagtttcatctccatctctagctgcataatccatctaccatttccaaagtatagttaataaattaatagtaatgagtatatagtaatgagagcaaaatgaagataaatgtaccttggtgattgagttaaagagagaggaataaagagacctaaaaagaggtctatccttaggaggctttgcttggatgattaagtaaaagtcttgcttcatgtttgatgcacttctccttagctctttccctccttctttccacaacttcttttctatcataatctccttgattctttttatattctctgcattttttcttaatccttcctatcaaccatatatacaaaatacacgaagaattcataatttgtaactcttgctacaaagagtcttccagaaacatattacggaggattaaaaccccaataatacaaagtgattgataacttacaaatctactctctttgtttcacaatataagttgttttagctaaaagcacgcagattaagaatatttacttttaaaaagttcaaccaatcacaaaagagactacataatataaataatcataaaatattaaagtaatatataatttgcatagaaacttgaaaacaacttataatgaaacggagggagtatgtatcagccttagcatttaatatcctctaaaataaagtttttgtaaacttactttggaattcggataaatcagtagatcaaaattcggtaatcttaaaaacagaaaaatgtttgaagaagaaaattgaaccttgtgactttaagtttacattggaatataattgtaaagagctttaccatttgtccatgtaagtaaacaaaatttattgttgtaataacacattgtcactcaaatgtttagcaattgttgagtcgagacaacatctaaattctaatataaaacaataggatcaaagtatcactaaagtgagttttgatatagtggtgttctctaaattcttgcaaaagttacattctctagtttgattttcatttaggagactattgagataggaaaatgtatggacctccaaaactattcaatgaaccacaaataatgtaattaaagtaaagacataactagtttaaacctgagcaagttccacggtgcgttcaggctcaggtggaggagctccgaagttgaaaaaatcagcggcattcgcagaagaagagcgtttgcgatcgaagaagaacagttgagggattagtgtacctgaaattgtgagcaaaacgtctcttcgtcttctagatgtatcaatagaaagtgctaagtttgaatccgatgtatcaattgaagaatcttgattgtgaaagaaagtgaaatgtagtggtggtggctttgaaatcgccatgtattcacgtttcaatgaaacaaagtagctgcaccattgaacaaaccaacctcatcacaaggataagaaccagagattaatccaacggccactagtgataacacgtgtcaactagtgcagataacacttacaactacccgccaaattttcattttttttgtttgttatatgaattatctcaaaggtgctaattgtaatttacagatacataacgtaacacgtaagatactaaaaactctcaatttgcgttttgacaaaaaatgtttcaaagtaagaaactaattttgttacaacaactaaaagtctaaattgaaatcataaccaaatcatcttcgtagaataattacaaaacatcaacaactaaaacatcgtcatgagacgaaaaatgaagttgtggagacgcgtctccggagctataaaggacaaactcagtctcatcaccgcgacggatgaaaaattcacggcggcggttatcaaagcgacgagtcataacgatgtctcaatggacatcgaaaacgttcaattcatctatagatacatacagagcaacccttccagtttcaaaccaattatacgcgccgtctcgttacgcgtggaacacacgcgtaactggacggtggctttgaaatgtttgatgttattgcacggcttgttcttctccggaatcatgaccgtcgattcgatcggacggttaccgttcgatctttcgggtttcgggagaaggaaatctcggtttagtagaaccggtcggtttaacatcttcgttcgcgcttatttcatgtttcttgacgaaagatcgattctctattataacaagaacatgattcgattagagattatcgttaagatgcaacgaatagttgattcattgatgagaatcaaaccaattggtgaaacacctcttgtaatcgaagctatggaatatgtaatcagcgaggttgttttgattaacggtcatatatgccgcggattcgcgggtttcttatccgatgtacagtcgaatatgctcgagatatcgtccgcggaggcggatttggcgatgaatatcgtggcgaaatctttgtcgcagagagaaaaactcttcaagtatttcgaattctgtagaggttttggtgtcaccaacgctcaagaaacctctaatatcttgcgaatcacggaatctcaaatgatagttctcgacaagctt

SEQ ID NO: 151 - DNA, 9638 bp, Arabidopsis thaliana
tgtaccttggtgattgagttaaagagagaggaataaagagacctaaaaagaggtctatccttaggaggctttgcttggatgattaagtaaaagtcttgcttcatgtttgatgcacttctccttagctctttccctccttctttccacaacttcttttctatcataatctccttgattctttttatattctctgcattttttcttaatccttcctatcaaccatatatacaaaatacacgaagaattcataatttgtaactcttgctacaaagagtcttccagaaacatattacggaggattaaaaccccaataatacaaagtgattgataacttacaaatctactctctttgtttcacaatataagttgttttagctaaaagcacgcagattaagaatatttacttttaaaaagttcaaccaatcacaaaagagactacataatataaataatcataaaatattaaagtaatatataatttgcatagaaacttgaaaacaacttataatgaaacggagggagtatgtatcagccttagcatttaatatcctctaaaataaagtttttgtaaacttactttggaattcggataaatcagtagatcaaaattcggtaatcttaaaaacagaaaaatgtttgaagaagaaaattgaaccttgtgactttaagtttacattggaatataattgtaaagagctttaccatttgtccatgtaagtaaacaaaatttattgttgtaataacacattgtcactcaaatgtttagcaattgttgagtcgagacaacatctaaattctaatataaaacaataggatcaaagtatcactaaagtgagttttgatatagtggtgttctctaaattcttgcaaaagttacattctctagtttgattttcatttaggagactattgagataggaaaatgtatggacctccaaaactattcaatgaaccacaaataatgtaattaaagtaaagacataactagtttaaacctgagcaagttccacggtgcgttcaggctcaggtggaggagctccgaagttgaaaaaatcagcggcattcgcagaagaagagcgtttgcgatcgaagaagaacagttgagggattagtgtacctgaaattgtgagcaaaacgtctcttcgtcttctagatgtatcaatagaaagtgctaagtttgaatccgatgtatcaattgaagaatcttgattgtgaaagaaagtgaaatgtagtggtggtggctttgaaatcgccatgtattcacgtttcaatgaaacaaagtagctgcaccattgaacaaaccaacctcatcacaaggataagaaccagagattaatccaacggccactagtgataacacgtgtcaactagtgcagataacacttacaactacccgccaaattttcattttttttgtttgttatatgaattatctcaaaggtgctaattgtaatttacagatacataacgtaacacgtaagatactaaaaactctcaatttgcgttttgacaaaaaatgtttcaaagtaagaaactaattttgttacaacaactaaaagtctaaattgaaatcataaccaaatcatcttcgtagaataattacaaaacatcaacaactaaaacatcgtcatgagacgaaaaatgaagttgtggagacgcgtctccggagctataaaggacaaactcagtctcatcaccgcgacggatgaaaaattcacggcggcggttatcaaagcgacgagtcataacgatgtctcaatggacatcgaaaacgttcaattcatctatagatacatacagagcaacccttccagtttcaaaccaattatacgcgccgtctcgttacgcgtggaacacacgcgtaactggacggtggctttgaaatgtttgatgttattgcacggcttgttcttctccggaatcatgaccgtcgattcgatcggacggttaccgttcgatctttcgggtttcgggagaaggaaatctcggtttagtagaaccggtcggtttaacatcttcgttcgcgcttatttcatgtttcttgacgaaagatcgattctctattataacaagaacatgattcgattagagattatcgttaagatgcaacgaatagttgattcattgatgagaatcaaaccaattggtgaaacacctcttgtaatcgaagctatggaatatgtaatcagcgaggttgttttgattaacggtcatatatgccgcggattcgcgggtttcttatccgatgtacagtcgaatatgctcgagatatcgtccgcggaggcggatttggcgatgaatatcgtggcgaaatctttgtcgcagagagaaaaactcttcaagtatttcgaattctgtagaggttttggtgtcaccaacgctcaagaaacctctaatatcttgcgaatcacggaatctcaaatgatagttctcgacaagcttctccatatcgcccccgagttagattggaaagccgcaaaagtaacgccggtaaccgcggcggatatggtggatttggtgaccagcgaggagcgctctaatactccatcagattttcttaccttctaatcacgtaattagtagctaatcatgttatagtctaacgttgtttgtacatctgtgtatgttaatgtgtataagataaggtaaaaatgcaaataaacaaccttgaaacatcttataaaaagattttcttcttcattaaaattgtttaacataacaacattttttatcaaaacaacatctaatgttacaagtcaacatttcaaacctaaagctgaatgaaatagtttcaaacaaacaaaacagaatatgaattaagatatgatcaagccctaaaaacgaagaagttaccttgaagaagaaggaaaaacaaaggtcacagttttgttgttatatacacgatcaatgaagaaaaacaagagcttttcaaactttatctgatcgtgacaaacttattggttccatgtctagcccaatgagacttcaaatcaatcgcattcccaaagctataaccttctgttgataacttctcaagaaccttcttaaacgcgccttgactcatcttcctacccgaaatccttgcaccgcgtcgcttagtactcatcggtaatggatacaccgaaatgttagtcgtacaacaagcggattgccatccgccgcaaccccaacggtaacattgttgaggagttccagtacaagtacaaaccggtacaggtaaaccagaaatgtccatactcacaccgttaatcacaagatcaacactcttcttaaccggtttcacacgctgctgctgctgctgaacattgttgttagtaacatctctctcttctttcggtttacgcatcttcttagctttcggtaccgttggtgttgcgatgctgcctctcatctttctcttcttaccagtctgctcttcacaaggagcaggaggaggaatcggattctcctcaaaccgggatgaattcaaaaccggttgatgtatcatctgaatcgaattcgaaccagatgtttccgacaacacattactataactcggtgtacttataggcaacatgttgaagaacttgttgtcctttggttgattaatccagctatagttcatgtcttgctctcgagagtgatacgaaccgttagaaccgatcataagattcgattcacgaccgggtaaaaacggtttagtgttccggtcaatagtagacataagctgcaaaccgagattacctttaaacgaagaagcagccgctggttcatagtatccccaattgcgaaatccatcatcgtccattgatgattataaaactacaaacaatgccattcaaagtcaaatctaaacacaatttgatccaaaacaataacagaacacaattgtaaaagtttataactttgtggttgaatctgattctaaacctcgaattcatcgaaatttccatgaaattaacataaaatctatccattttctaacgaaagcacagatctttgaggtacccagaaacgaaaattagggtttttgtaatcagaattcaatttttgtttgagacccatattgcagagctctagatctgagaaacccagaaccagatctgaagaaacagagcataaagtttcgattttttttttgagagagaaatgtttcagatctcgagttttattagtcataagcttcgatgagaagatcgctagaaatgggaaagacaaagtaaacagtacaaaaagaggacgcaaatgataattttcgaaagagagagaaagagacatagattgatgagagagaaatctcttacatgggtttggtctaaacggctctttaaagaattttttgacctcctggagagaggagagagaaacctgagagagattgagaaagagaaagaaagatagaagagagaggaaagagaagcttaaaaagatcttccctgttttttttttcttcttagaaaatcctaaaaatgacactttaatataatatttttggtgaagagattatttttggttatttgtagggtaaagagatttgggggaagaagaagaagaagacaaaaacaaaatcaaagcccacttcttctccttatcctttacattgtactattgataaaatatacagtatttgtcatagcattgagaaggcaagctcaataccacttttactaatgagatcttagtctttaacccatagccacaactaagcttgaccaatatctaatcctcaagtaatgaaaacatcaattaccttttgttttcattgtctgacgtatgagctaacaagacgaagattaaccaaatattattattttaattggtaaatattctaggcaaagcttagaggtcgcgttacatgttgtacttttgggtcttcggaaattacggctttggttcagaatgttctggtattcaaaaaaaaaaaaacaagaagaagattaagcatgtaactaattaagaagatgtacaacatccaaacagagaaattcaacacttgatcaaacatccaaagatttccaatagctggattcacactagatatgaagatagagatttatgtgtatgaatctccggaagaagcttttttttgttaaagtctctgtttccatgcaactttttgatttccatggataatgctcaacaactggcccatatgcgactcatttaagagataagagacccaaatacttaatatcaaaattacgtccagtggactcatattcaaggccggtaatcatttcggcccataaccactttttttttgtttcaccaacttaatttgattttaaattgagtagccaacattataattacacacgtacattttgactaaaaaaattttgttgactgaagttgtattttatcttaattcgatttgaaagattgagtacaattatacacattgtgtttattttcttggcaacattttatagagtttatggatgtatgcgaaacttgagaatgaaggcatgagaccaaaatatccgaataaaatgagtaatgatgtattgagaatgttcttttcagataaataactaattttatgtttatatatatggttttttattattaaaaacattaataattgaagataaaaagaaaagataaagagagaatcaaagggaggagttgggggagatgatggcatttctttgctttgtaaatttggagcatgtgacttgatccttctttccaactcaaatctcctacttatattattttattcattctcttgaattaacttctaatagtttaccattgttattcgaatttatcttgattatatagttaatatttgtgagatatatcctaggtaaatatacctgaatgtccaaaaactaggtctaaagagctcaatatttttatacattaaacttagatttcaacttttatgtataacttttaaccttggatcaaccactaggccattgtcgatttatttttgactattaaaaatcagactattgtatttcatttaacatgtttttgtttctttttgaatttttgcattcatttaagatgttgtggtctctcaagtccatatataacgattagaaactacaaatttataattttgtagctccgaaataaatatcatgcattatgtatcagctagaaaagatctaatcagtggtaataatcgataagcaaagggttaagtaagagatgggagagtaatctcatcttaggaaatgattacaaacacgatctcatttctttcctttatacaaagctgtcaccgtagtaactcgatcacatcttctcgtctaatttgttctgtttttcctttcggtccatttagaaccaatttttgacaactgacaaaaaacattatgaggtatcttttgtttcttttatctgcaaattaatttattattcggcaataacaaaaataaaaacaactagtagcgaatagcgatcaagctaaggaaggaatacatatggcatttacaattgaaacagagaaaatgtgttaaagtaacaaaacttatgattgagaaaatttaaaccataattgaaacagagaaaatgtgttaaagtaacaaaacttatgattgagaaaatttaaaccataataatgattaattttggtagtctacatatgagttccatcaaaaaaaaaaaaatgttttcatataagattcatttcattcttgatccagtaacattcttagatctgttaatgaaccttcttaaggaatgactgagaagaaaggcaatagcctaaaaggaatcgacagtggagagtggagggaaaaagaggtcacgtgagtaagacataaggtcacgtgcgcgagggatcgaatatgaattttactaaaatagggttttataaaaacatactaatactactttcacatttactcttggtttgaattatttttatacgcatgtataatttgatatatttgtcttttttcttcccctaactatgtatgggcactagtacatccattatataagccaaatagaaagaaaaaataatagtttgtctgcattattgtaaacttacagaatttggtatttaatgcaataatgcatttttatccttggattattcacaagaaccatatacctttttttttctctccttgtttccaagtgtaattcgaaaagaatcttaacatgtatgtggaccaacgttggaaacatgatgacataacattcatatatagttaacaatgacaatttttcttaaattgtctatatattattggattgctttaacaataatgaaacgcaagatgtattagtgatgtataatcacactatttataggacttgagagtgacagtcaaaaagttaattagaagtaatgaagtatcttaaccttattatttaattgcttcttacatcatctaagagttagcaccgtatcgatattcataaattctctcctaatttgcagatacaatacaactattgctattttaagcctctaacctgcataatattttgatgaaaggcaagccttacatgtggacgtatgatctcatatatttttttttttcatttgttagaagaaactcatgtagataatctcaaacataaaataaaatgtttcaaaaaaaaaaaaaaaaatagtttgtgaaggttcaagaaaatcagacaaattcatcaatcagacaagatatgggtccaagccaaaaaattcatatatccaacatgctcaaagaaacaaagtctaaaaaataaatacaaaataacaaaaagaaaaatctaaaatctacatctaaatctaaataaatacaccaccttctctctctctctctctagctacacgagtgtatgtatacattttacgcaatgatggcatagtgcaatgagctttataagtagaagcaatatagacatcaaagaccccttatttgctctcaactctcaagtgtatgagagagaaataggtttttgaagaagagtcaaaatatatacccaaagagagagctagagagagagagactcaagaaaattaaaaagctttcatcatattaacataagagaaactttgaagagcctaagaaaaagttttgaaaagcctttgttgcagaaagcttaaaagaactttttctctccccctatatctctctttatcacccttcctcttctttgtaaagctgaatctcccactatctcttcttctttcatttttttttttttttggtctttgggccttgttctttcatcaaatcaatctctagaatccaaatacaataaagtcaaaaagaaagatcaagaaaagtagagtaattgatgagaacagatcaagtgatgttgtccaacaagaacacaaacacatgttgtgtggtttcttcttcttcttctgatcctttcctctcctcttcagaaaatggggtcaccaccacaaacacatccactcagaagaggaaaagaagacctgcaggtaccccaggtaataataaatccccactacagaaaatttatttttcaaaatctttttttcttgtttttattttcttatgaaaattttcaactcatgggtactattgttttttgttttttttttctcttaaaccccattagaaatacaggtttattataggtttagttttaaaatttctctttttcttattgccagtttcaaagttataggtacaattaatgggttttcattgtttttaattcttaaacctcatttaaaatctcaactttattaatcaactaagacatgtgttttgatgggttttgccttatctccttttcagatccagatgcagaagttgtgtctttatcaccaagaactcttcttgaatcagacagatacatatgtgagatctgtaaccaagggtttcaaagagaccagaatctccagatgcatagaagacgtcacaaagttccatggaagcttcttaaaagagacaacaacatagaggtgaagaaacgagtctatgtttgccctgaacccacttgccttcaccataatccttgtcatgctctgggagatcttgtcggcatcaaaaaacatttcagaagaaaacatagtaaccataagcaatgggtttgtgagagatgctctaaaggttatgctgttcaatctgattacaaagctcatctcaaaacttgtggtactagaggacattcttgtgactgtggtcgtgtcttctccaggtataatttcttgttcctctctatcatttgatttttttttgacccattttataaattaattattggtattattaattctgaaaagatatgcaaacttttggaaggatttgttaagtatttctaaaatatacaagtaatttgactctgtttgttttgtatatttaggagatcatatagaaagacaaatatagaaaattcttctagggaccaaagactaagattgatagttatagtactatttgatttgactatccttcatgatttttactaattctgtgtattgatgtgtatgcatcagagttttttaatatatctcttgactatttgtttggtttttgtgacataaaaagaaagttaagcacttagattaatgacattgaccccaatctctaaagaaatattttatgtatttaggttattattggaccttttttcgacacaaaggttataattggacctaaactcatattaataatatatatttttgagttcaaaggtatttaataaacgacgtttaaacagaaaaacttaat

SEQ ID NO: 152 - DNA, 76976 bp, Arabidopsis thaliana
gaattcaatttttgtttgagacccatattgcagagctctagatctgagaaacccagaaccagatctgaagaaacagagcataaagtttcgattttttttttgagagagaaatgtttcagatctcgagttttattagtcataagcttcgatgagaagatcgctagaaatgggaaagacaaagtaaacagtacaaaaagaggacgcaaatgataattttcgaaagagagagaaagagacatagattgatgagagagaaatctcttacatgggtttggtctaaacggctctttaaagaattttttgacctcctggagagaggagagagaaacctgagagagattgagaaagagaaagaaagatagaagagagaggaaagagaagcttaaaaagatcttccctgttttttttttcttcttagaaaatcctaaaaatgacactttaatataatatttttggtgaagagattatttttggttatttgtagggtaaagagatttgggggaagaagaagaagaagacaaaaacaaaatcaaagcccacttcttctccttatcctttacattgtactattgataaaatatacagtatttgtcatagcattgagaaggcaagctcaataccacttttactaatgagatcttagtctttaacccatagccacaactaagcttgaccaatatctaatcctcaagtaatgaaaacatcaattaccttttgttttcattgtctgacgtatgagctaacaagacgaagattaaccaaatattattattttaattggtaaatattctaggcaaagcttagaggtcgcgttacatgttgtacttttgggtcttcggaaattacggctttggttcagaatgttctggtattcaaaaaaaaaaaaacaagaagaagattaagcatgtaactaattaagaagatgtacaacatccaaacagagaaattcaacacttgatcaaacatccaaagatttccaatagctggattcacactagatatgaagatagagatttatgtgtatgaatctccggaagaagcttttttttgttaaagtctctgtttccatgcaactttttgatttccatggataatgctcaacaactggcccatatgcgactcatttaagagataagagacccaaatacttaatatcaaaattacgtccagtggactcatattcaaggccggtaatcatttcggcccataaccactttttttttgtttcaccaacttaatttgattttaaattgagtagccaacattataattacacacgtacattttgactaaaaaaattttgttgactgaagttgtattttatcttaattcgatttgaaagattgagtacaattatacacattgtgtttattttcttggcaacattttatagagtttatggatgtatgcgaaacttgagaatgaaggcatgagaccaaaatatccgaataaaatgagtaatgatgtattgagaatgttcttttcagataaataactaattttatgtttatatatatggttttttattattaaaaacattaataattgaagataaaaagaaaagataaagagagaatcaaagggaggagttgggggagatgatggcatttctttgctttgtaaatttggagcatgtgacttgatccttctttccaactcaaatctcctacttatattattttattcattctcttgaattaacttctaatagtttaccattgttattcgaatttatcttgattatatagttaatatttgtgagatatatcctaggtaaatatacctgaatgtccaaaaactaggtctaaagagctcaatatttttatacattaaacttagatttcaacttttatgtataacttttaaccttggatcaaccactaggccattgtcgatttatttttgactattaaaaatcagactattgtatttcatttaacatgtttttgtttctttttgaatttttgcattcatttaagatgttgtggtctctcaagtccatatataacgattagaaactacaaatttataattttgtagctccgaaataaatatcatgcattatgtatcagctagaaaagatctaatcagtggtaataatcgataagcaaagggttaagtaagagatgggagagtaatctcatcttaggaaatgattacaaacacgatctcatttctttcctttatacaaagctgtcaccgtagtaactcgatcacatcttctcgtctaatttgttctgtttttcctttcggtccatttagaaccaatttttgacaactgacaaaaaacattatgaggtatcttttgtttcttttatctgcaaattaatttattattcggcaataacaaaaataaaaacaactagtagcgaatagcgatcaagctaaggaaggaatacatatggcatttacaattgaaacagagaaaatgtgttaaagtaacaaaacttatgattgagaaaatttaaaccataattgaaacagagaaaatgtgttaaagtaacaaaacttatgattgagaaaatttaaaccataataatgattaattttggtagtctacatatgagttccatcaaaaaaaaaaaaatgttttcatataagattcatttcattcttgatccagtaacattcttagatctgttaatgaaccttcttaaggaatgactgagaagaaaggcaatagcctaaaaggaatcgacagtggagagtggagggaaaaagaggtcacgtgagtaagacataaggtcacgtgcgcgagggatcgaatatgaattttactaaaatagggttttataaaaacatactaatactactttcacatttactcttggtttgaattatttttatacgcatgtataatttgatatatttgtcttttttcttcccctaactatgtatgggcactagtacatccattatataagccaaatagaaagaaaaaataatagtttgtctgcattattgtaaacttacagaatttggtatttaatgcaataatgcatttttatccttggattattcacaagaaccatatacctttttttttctctccttgtttccaagtgtaattcgaaaagaatcttaacatgtatgtggaccaacgttggaaacatgatgacataacattcatatatagttaacaatgacaatttttcttaaattgtctatatattattggattgctttaacaataatgaaacgcaagatgtattagtgatgtataatcacactatttataggacttgagagtgacagtcaaaaagttaattagaagtaatgaagtatcttaaccttattatttaattgcttcttacatcatctaagagttagcaccgtatcgatattcataaattctctcctaatttgcagatacaatacaactattgctattttaagcctctaacctgcataatattttgatgaaaggcaagccttacatgtggacgtatgatctcatatatttttttttttcatttgttagaagaaactcatgtagataatctcaaacataaaataaaatgtttcaaaaaaaaaaaaaaaaatagtttgtgaaggttcaagaaaatcagacaaattcatcaatcagacaagatatgggtccaagccaaaaaattcatatatccaacatgctcaaagaaacaaagtctaaaaaataaatacaaaataacaaaaagaaaaatctaaaatctacatctaaatctaaataaatacaccaccttctctctctctctctctagctacacgagtgtatgtatacattttacgcaatgatggcatagtgcaatgagctttataagtagaagcaatatagacatcaaagaccccttatttgctctcaactctcaagtgtatgagagagaaataggtttttgaagaagagtcaaaatatatacccaaagagagagctagagagagagagactcaagaaaattaaaaagctttcatcatattaacataagagaaactttgaagagcctaagaaaaagttttgaaaagcctttgttgcagaaagcttaaaagaactttttctctccccctatatctctctttatcacccttcctcttctttgtaaagctgaatctcccactatctcttcttctttcatttttttttttttttggtctttgggccttgttctttcatcaaatcaatctctagaatccaaatacaataaagtcaaaaagaaagatcaagaaaagtagagtaattgatgagaacagatcaagtgatgttgtccaacaagaacacaaacacatgttgtgtggtttcttcttcttcttctgatcctttcctctcctcttcagaaaatggggtcaccaccacaaacacatccactcagaagaggaaaagaagacctgcaggtaccccaggtaataataaatccccactacagaaaatttatttttcaaaatctttttttcttgtttttattttcttatgaaaattttcaactcatgggtactattgttttttgttttttttttctcttaaaccccattagaaatacaggtttattataggtttagttttaaaatttctctttttcttattgccagtttcaaagttataggtacaattaatgggttttcattgtttttaattcttaaacctcatttaaaatctcaactttattaatcaactaagacatgtgttttgatgggttttgccttatctccttttcagatccagatgcagaagttgtgtctttatcaccaagaactcttcttgaatcagacagatacatatgtgagatctgtaaccaagggtttcaaagagaccagaatctccagatgcatagaagacgtcacaaagttccatggaagcttcttaaaagagacaacaacatagaggtgaagaaacgagtctatgtttgccctgaacccacttgccttcaccataatccttgtcatgctctgggagatcttgtcggcatcaaaaaacatttcagaagaaaacatagtaaccataagcaatgggtttgtgagagatgctctaaaggttatgctgttcaatctgattacaaagctcatctcaaaacttgtggtactagaggacattcttgtgactgtggtcgtgtcttctccaggtataatttcttgttcctctctatcatttgatttttttttgacccattttataaattaattattggtattattaattctgaaaagatatgcaaacttttggaaggatttgttaagtatttctaaaatatacaagtaatttgactctgtttgttttgtatatttaggagatcatatagaaagacaaatatagaaaattcttctagggaccaaagactaagattgatagttatagtactatttgatttgactatccttcatgatttttactaattctgtgtattgatgtgtatgcatcagagttttttaatatatctcttgactatttgtttggtttttgtgacataaaaagaaagttaagcacttagattaatgacattgaccccaatctctaaagaaatattttatgtatttaggttattattggaccttttttcgacacaaaggttataattggacctaaactcatattaataatatatatttttgagttcaaaggtatttaataaacgacgtttaaacagaaaaacttaatataaaattattaactttgtcacattttcataatcctacgtcatataaattatgtaattgataggtttcttttcttcttttagggtggagagttttattgaacatcaagataattgttccgcacggagagttcaccgtgaaccgcctcgaccaccacaaaccgcggtaacagtcccggcatgctcttctagaaccgcctcaaccgtcagcactccgtctagtgaaaccaattacggcggtacagttgcggttacgactcctcaacctctagaaggccgtccaattcatcagagaatctcatcttcaattctcaccaactcatcaaacaatctcaacctcgaactccaacttcttccattatcgtcgaatcaaaaccctaatcaagaaaaccaacaacaaaaagttaaagaaccatctcatcatcataatcataatcatgataccacaaacttaaacctctccattgcaccatcatcatcatatcaacattacaacaactttgatcgtataaaagagattatggcgagcgagcaaattatgaagatagcgatgaaggagaaagcttacgctgaggaagctaaaagagaagccaagaggcaacgagagatagcggaaaacgagtttgcaaatgccaaaaagattaggcaaaaagcacaagctgaactcgagagagctaagtttttaaaggaacaatctatgaagaagataagttcaacgatcatgcaggtcacttgtcaaacatgtaaaggacagtttcaagcagttgcggttccggcggctacggctgatgagacgtctcttgtcgtgagttacatgtcgtcagcgaatactgacggagagttggaaaatggtttttaagtaaaaccgaagaaaacataagatatttaaattgaggttaactttattatacttttgtgtattaattaccggttgtgttaattttttcaactaccatatattatgtaatggttgttatatagttgtttctttggtccaacaatattagactatgttttgtaactatgttactgtcatttccgccacattacactttaaattgttgaaaaatgattttatcctaggtttcatatagaaccttaaaattaaattttatcaacaaaaaaaaaaccttgaaattaactatttaaatttttatatagatattttttcgtcttgaacgtctacagtagtttagaaggagttaagagtggagatccgtacatgcgtgttttgatctttggccttagattcgcttagaactttcaatggatatacaatttttttaataaaacatgtgatatgcggatttgaattcggttaaatatacatttgcttatccttgatttgtctacattatttttggtaagcttgaggtgatatatttgaaaacaaatctcacgttttaaggatcaaaacagtccctgcatgatagagattatcgacatctaatgtataccagtatatttagtaagtttgaaagagggtaagtagttgcttggcacgagttgatatatggagtgatgggaaatgtactattatgatgtcgttttggtccgtgaccgttacacttataacgaggttcataaacaaacatcgtttcatctttcgttagattcggacaaaaagtgttgatctataatgatgataaaacagcccgacccattttcacttgttgttattacaacttttagcaaattttctagctactcatttattgtctcgaaataaatttttacagagacttctgattttattttaagtaaaattttacaagaaaatgcatgtcaaataattctactgttcacacatatgaccaatactcagagtagtccatatcaaattttatatagaactggtcgttggattctaagtaattaagtatttagtctagttgaccttaaaaatagatagttaaaaacacctaatattcatgagagataaataaatagccactcatcaaattgttgtgcattattcatgtgtgtttagtataaaatttgaaacccaagactacactgcgttaagaagataactccatctgaaaactttgtggtgataaataaaatttggtgtgcaagtcatacaaagataatacatgtttaagccacatgattcatataatatacccatttgagatttcttaattaatacataatggtgattattcatgtttctagccaaacattttttagatgaatttttttcttataaaaaaaaacccaaatatttttagattggacaggtctatgatgtgtgaacatacataataaatgaatgtcgatacatgaaagagaaagagtttgattggggcaagtatatagatacatacatatacgcatatatagcaaagaaaatataaaataacaaaaataagacgatcttttgcgtatgagattgaagaagctatacactacaaaaatctaaaatccgaggtgggtttggtttttgtacatcttttgggaccaatttcgatgcagaaattaggaggatataaagactttaataacgaggacttgaagaaatgacatgaatgtctgtctgagagaactaaagaagtgggttaagtaaataagagagtgacaaatgcctgcccgttactccgtttcaactctatggcactgaaaacgatgacgtttttttcccgtcgcatttaatgtgcactcaattgcattgaaagtgactatttatctctctctctcgttttcatcatttgtgctaacacgcagagaggtttgcagattctgcagctatgtttgtcacataaagagaggtggagagagagagaaagagatagcatattaggctttctctataccaatggccaaacacatgtgtgtgtaatataatgcatgtagaatatgtttgatgatggtttatgtcacaaactcgtgaacgtaaaacaatgtacgtaataatgtctaaccatgtgtacataaaatgatggaattcatgtaataatgttataatgtataaaaacgattcgttatgtcgctatatgcatgcaattagcgtactttgagattatcaattgtaattgcttcaaaccaaaagaaatagattaataattatatggctcggatcatctataatacatagttaggttagggagttgtaacgaattaaaatatagaaaaggaagaacaatggaacgtgcaacacaaaaaaaggttttagctttttatctcttagcattttttttaagaagagcatgtgcatacttgcttctcttcccccaaactttcaaatgctcatgcctttctcaacccaaatgaattgttccttcttctcttatcttatttatttgcatgtgttatatgatcaaaaataccaaagaattcactacaaaaacaaacctttttcatctaaataaagtaactacattatcaattagaagtttcatggaaaaaaaaatcatttttaagccagagatctttgtttgtcaacaatattgaaaaagaaacaatatttaataataatgtacttagttgttggatttggaattggcttagcatgaaaatctctcatcacatgcgattgcctcatacttcccacaaaggaacaaccatatgcttaacttctatgtcatgacaaaaatacccctcacttctttgatgggatgtatgagtcgacaccctttactcaatgggtatttccgtcttctctgatttgtttactactaccatattctatattgattatttttttatttttttataaagagatccaaacattttcgttttgcttagcttcatcttatatacaatctcttattaaatcaagatttttttctgtattattgttttatttccgaattagaattgaacgttttatatcaattttgttcaacaaatatttgttttaattacaaataaatttcaaaaactatgcacatataacataaacgttgtgtatttgctggcttctatactttatttaattattattgatgaatatcagctgaggtttgtctttatttgcttaaatatgtgtaagataaaatattaaatctccctctattatatggatggacccttttgctatatctgtgttttgcactgaaacttgaagcattttattattttgtctttttcagttttgttcttatattagctcttagtaaatcaaaatttggcattttcctttctcatttaattccaaatatatattttaaatcttcataaattgttcaatctccattattaatatacgtgtaccttgataatttttgcccatgacacaatatgttctttgttatcttccatttagacactttccattgttttctctaataattcaatcacttttttttttcagataagacatgcaacatgcactacaaatatacaataggacgtgtttaaaagataagttcattttaacctaagaaaatattatgctagttttaaccgttcagaataattatcggcattatatgatctatgaatcaatctatcatccatgatactcatgaaaatgtagtattcgtttgctttcatttatttcttaacccttttatacgatgtgacaagtcaactgtactaccatttattttccagaagaataaggcttatttatatatatcgaggatccgaatggtgactgcgttttgcggtgcgggaaaaatgcggtgcggttcaaataataacgaaaatacataaatacatatatctatatatagattttgatattattacagcattgttgcattgcggttttaggtgcggtttatatcatcatttatgacctgaattacaaaacaaattttggtccttataaaacaaattttggaaacaaattatgtttagtaagaccaacatttttttttttgggttaaagaccaaaatttgttttcaacagaaaagagataaggctgtgagaaagtgtcagatcacacaggaaaggaaacatgcattgtggcattgttagctaaaagaaacaaaattcgaattgtgacatataaaaacaaaagaaacatcaatattcttgcgaggatttgatacacatatcttactgtaatattttttaacttatatatcaaaattgcagggaggggagtgttcttctagataaagtagagcaaaaggacgataaaaaattaaaaatataacagtaaaaaaagtaaagtaagacaaaattatttacataatttttttgatgtaacagaggaaagagaaaaactatttgattgccagtgtgggtttgcagagacaaatataccccgcgcctgcaaaatcctttactctgttttgttaatttacaagtttaccccttagatagttactgggatcccaccgtcgagatgtcttgtcacacgtgaattctactactaagatactattatttctctgctctccactttcacgtaacatcttatactatacagtttttatacattctatacgatatacaatctacgaaaaaaaaaacgatatacaatctaccgaaatagtatagttataggtctgtttatatagtcttatagatttgcacatttttcaaacaatgatgatatgagacctaattttcttagggtattttcaatggtctttctatatttttctttatttttaaaggtgattctattttagaggtattgtattctaataatcatctctaaaattaagttttcttataaaaaaaaatagagatatatttttttttaaatagagatgtttactttttgaggaaactctattttatacgtgactattggtgcacaatgcctctaaaatataatcacctctaaaataaaaaaaattatagtggtcactttttcaaaatatttagaagttgcatatccgaaagcatgcaacttctaaatattttgaaaaagtgaccactataattttttctattttagaggtgattatattttaacctatattctcctccatattctccttttatattttgaaaaagtgaccacagtttttgacctatattctcctccatatccaaaaacaaccgtttgataataccgttgttaatgtgttaatcatttctttcaattagaatggaactattgaaatttgaaaactctaaattactagacaaccacctacttgattcacatcaacaagtataaattcacacatactaatgaagtaacacattgaaatatattctcttttgtggtttgaaatactattctcacaaaaaaaaatattctactcacgaatgtatagtcttatagtgttagatgttcataggcctgaaggagaaagagtcattatgggcctaatgtttctatattctaaatagttctttatggcccaaatataattttgaaacttcagttgttgagcccatttgtatgttctctatccaaagcctaatcgtgtgtattcgagcgtttaataaagaacaatttttttttttttttttttctaataccaggaagttctgggccaatgtcggtaatcctttcatgcacgaaaccacatcgtgtaatattagtttcgtttcaagcgttactcaaatcggcgttctctaagcttcgtttacggtctttaccaattgagctaacgacactcggtaataaagaacaattcaccaactaagactctgatttgttataatctgcatagttatttattaaaggaatcagaatttaaattacattaattaagtcttgatacatcatgaaattttaatcattgatcaaccacacatacacattctcacaggaaaaaaaaatgcattgaaaaagccagaaaaacaaaaaaaaacagagatcttcatgttgttacaagctgttactgtgactgtgactattattttcacttccacgaagttctctcaacgaagcaacaacttgtaacatattaggtctctttgatgggaaatcgtcaacgcaccgtaacgctatctccaaatacctcaacatttctttcacaatcactcctccttcaaaaccttctttctcattcagagactccgaagaaccttcttttagaaggtcttcatcaatcacttccatgtgtttcccttctcttgccttcatcttcgaccaacctactaaattcgtatcaccaaactcttctttatccgttggtcttttcccgcttaagatctcgagcatcactactccgattgagtacacgtcgccttttgcggtacatctgaaactttggtaatactctggtggtacgtaacctggcgtgcctgccaaggtacttacactcaaatgtgtgtctaatgcgctgatcagtctcgccattccgaaatctgaaactcttgcttccatgtcttgatcgagaagcacgttgctcgatttcatgtcgcggtggattatgtgagggatacaattgtgatgcaagaaacaaagtccttttgctgctccttttgcaatctttttcctctcttcccaacctaaaatcctccgtttttcgcctgttcttggtccgtgaagcacctcctcgaggcttccgtattgcataaactcgtaaacaagcaatctctcttccccgattttacagtatcccaagagcggtacgaggtttcggtgtttgatcttccctaaggtttccatttctgccatgaactctcgatctccttgacaactaagtctaatgagcttcttgatcgccacggaagacccgtctttaagcgtcgccttaaaaacctcaccgaatccgccgtgtccgatcatactcgcggctgagaatccgtttgtcgcctcgataagctgcgaaaacttaagctttctcaactgtcgctgaaacgtcgctacattaatactcaacggctctttctccttctctatcttccatgtagtggcggaattaaccgcctgcaaactgtgaagcatcttcgcatcatccgcatctctcctcctcgcacgaaccgcaatcgcccaaacgattaaaatacaaaccgaagcagcggaaatcaacactcccaaaacaatgctattcgcccaagaagctgccctagttccgtgcttagcacgtttcccttcctctgttccagcaggaagctgattgtttccattcttacattccggtaaaggaacaccgcaaagccccggattattcgcgtactgagtcgccggaagcgtgcttaactgacctctctgaggaatcggaccagttaactcgttattcgacaaatcaatctgcaccaagaaagacaaattcgagaaagattcagggatttgaccctgcaaccgattatccgaagcatcgaaaacaccgagattcttgagctgaccaatcgtaaacggaatctcgccggagagttgattatgagaaagctcaagaacttgaagagcaatcatttctccaatctcatcagggattttacctctaagctgattataagaaagatcaagatactcaatggtttgatatcttgtgaatagactcaaaattggacctgaatacattcttgtgaagtcacagcttttaagagatggaatctgaagaagcctctctggtctgatccctgagaactcaaccaaacctccaacacctttacatgagtttccaacgtttctaacaaaagccattgtgtttcctgagagtaaaccggaaagtgcttttgaaccgggttgacgacctaaccggggagggatttcaccggttaagtggtttgtgttaagatcaagccaaaccagagttgtgcattttcctagctccggtgggatttctccggtgaaattgttgttaccgagctgaagaacggctaaccgggaaaggattccgaaatctttaggcacttctccggttaatctgttgcttgtgaatgagacccattcgatgttactgcaattgaaaaattccggtgggatttctccggtgagttgattgttgttgaggatcaaatcttttaggttttgtagttttccgatctccggtgggatttctccggcgatgttgttgtaccaagctatgaattgctcgagtttctggaggtttccgatctccggtgggattgtaccgttgagataattgagactgagatcaatcgttcgtagctcagagcattgagatatcgccggtggaatctctccggtgacgagattatccgggagtcttagctcttctaatgaagctgctccgggacataaatccggtggaatcacaccggagaatcgattcgagctgaagtcagcgattctcaagctcttacaagcagagattgaagtcggaaagtcaccggagattaagttgttgctgagaagtaagatttgaagagatccaaaactccggaggatagtgttcggaaacggaccggagatgttgttgtttgaaaggtcaagactttgtagccaagaacatgaggacaacgactcagggatcacaccagtgaagttgttgtaagaaagccggaggttttgtaatgaccggcaagtatctccgatctccggcgggatccaaccggtgagtcggttatgagaaagatccaaactttgtaagagtttaagctcaccgaaagattttggaatctgcccatcgaagttgttgtaagaaagattcaagcttttgaggttggtgcagttgatgagtgagtcagagatatagccggagatactgttaccggagaaatcgagataggtcatggagacgcaagaagaaagaggaatggttaaaccggagattggaccggtaatgttgttgtaagaaagatcaagggtttggagtttcttgctgcttaagaaaagatcattaggtaactttccggtgaagttattgtaagagagggtgatggaaataagatttgagtatttggagaagaaattttcagggagggttccgattaaaccggaggaagagagttcgagatgagttagggttaaaggaagaagaagaagagaggttgagtttaagacgaagaagttctctgagagtttgagaacagagagagaatcaagagaggtgaaagcattgaaggagacgattccggagaggccactaccggagagattaatctcggtgactcttcctccgagacaagtgacgccggagaattgacaaggggatttacgaggtgaccagtttgagagaatgttgtttggatcatcttggatcattgttttgaaagagaggagtgataatgagtcggttttgagtgaagattggtcggaggaggaagattgtgagagatgggtaaggaggaagatgaaggagatttggatccgagtccggatccgaacccggattggtgaagtagtcattggagggaggttttttgagtttgaatggagaaggagaagtaagtaagttgaaacatttagatgataaagagacgatgctaaagcagaggaagaaaaagggctttttttgaagaaaagaaaaagctgcttttaggtaatttattaagttttattaattgttgatgcttattatttttaaaacatctttgtcgaatcgtttttttttacatatgatgtttttctaatagatgattgatttattaaatggttatgatcaatcttatgattttgtggaattgtgatcatgacttgtagtgatttgtgtaagtgacattattaatctaatagaatacatgttgtttgataatcaaaaaaattaagttcagtttatagaataaaactctaatatttagaaaaatatgttttcagtttcatttagtcctatatctatttgtttctaatggtttcataattttaattcattaaagctccatgtggggattttgaaccttagaaagaattatgatcactgctaattttctaaatgggaattgtatctatgagatgtttcacaaatttcaatgaagaaaaagtgtagtattatataaacttccatttaaaaatttagctatatactattgttgtataacatttcttaaaatgatttaaatattagttgtataacatttcttaaaataatttaaatattagatgacaagcaactagatctaataagagtcggaaggaattgtccgttgtagaatcgtctatgtaacagtgcaataaataataaatctaagactggcaaaaaaaaataattgacaagcaactgaatatgaatatagttagtgatatagtgacaacactaataaaaacgaacataatagaaattctagtctataatcacatcaagtttggaattttgggataatttgttttgtttttgttgtgtattgtattaatactttatttaaaaaaaaaacaaaaccttttacaaaagaatggcaattatattgaaaggaattttgggagaaattattccaaaccgatatacaaatatttcatatggtggggtgtgtggtcaaaataattgggacccaatttagtcataatatgcatcgcatatgaaatggtcttttgtaaaatttggttgatccaatgttcactgtcgaggcagaggcgtgggggaatgaacagagaagtgactttacaaattacaataacaaactttaaggtgtaaccataatgttgctcacttctttttccatttttatgtgattttaattagtttagtttcatataatatgccatagatgagcctttatatcatgttccatgtcacacactccatccttttcatcattacactgccttcttccaccaagtttatgagtagatttgtatgacttaagcaaaatattagcttgattatttcagccaacgagaaaatgctattttgaaatgttcattgataaataatcatatacacatattaaagaaaaaaatatacacaagtcatattttaaaatgtttcaattggttataccctagctaccattcaattgcacaagagactatttctttaagatcaatagtttctagtaagaaataattattcttagaacatttttccattgcaattaatagtgcaaatcttatcacctatagtgtgattttgtgtgttataaatttgtaatatatcatactgttgaagactatagagtatattttattgattctgtttaataaataaaggaccgaatagtggagagtaatagagaaaaagccccacaaaagaaacaacatcaattagctcgtggtttagtggcatgagaggttatgattcctttggccccaatatttttaaataattctttatgtaaattcttcttttcactaccactaatccttatatctgttttgtatgaattttgttctgtattctcttgaacgtcaagttatttgaccgctcaacaagtaattccaatcgaaatcagactaatttgcaattttgtatgagtagtgagtaaatacagtataccacaaagattgacttctccccatggccataaagaatcaacattgaaaaatattcggtaaacgttttagacttttagttatttttttttgtccaaagtgtgtagtatttgaattctatttgcatgtgagttttagtgtggaatcactaagtatttgatgtgtttacgagtgaattactttgacgattcaagttggtttaatagtgtgttgtttgaggattcattctattagatatgtgtatatagttagttgattgtatatagtatagttgacatttacatgtgcgtattgatacttgtatatatagttcattgtacacatactttacaattaatgagaatcagaagttatttagctaagatcttaatacattaaaaaaagaccacatctctatgactctatcgatactttcttccatccgaccactatagtttcaaatctttgcttccgttaattgaatcattaggtggatttctgtgtgtttttatagtagatataatacatttggggttaccataaagtttaagagatcttaagagcaagattttgtctttattaaagggaaataatccaaaatagaaatagtagatgttgatttttttttaaaatttttaataataaaaacggaaattaccatatattttaaagaatgcggaaagagaggttttaggcttttgcttctataggtgttgcaactcaatctttttgtttgttgctaagcttgtaaatatcatttaaaacaaagtttgaggtatattacaaagaacactactcaaagttataatagagtaactttggcaaaaagaaaataaaaacaaagttatagtgagattttggaaaatagaagttatcgaatccaaaagagcattagtactcgttaatgcttcatatgacgccttcggagatgatgttgcgaatatctctgacaataatcttgaagatagatgtgtgagggatttgttgatcgttgtgcaacacattatttctttatcgccaaatatggcacacagaagtttgtcaacaaatattacatatatgaatgtatacacatgtttttgataattttgtatacgcacacgaccaaaagtactaattactccttaacgatatcatgtattgatatatgttaacaagcgcatttacacgtctacctataacaaataattgaaagatatggtatattattctttttaaaatcatgaaaaatatatagacatgctattgtctcggtggtacaaatcattggtgtattatataattttaaaaacctggtagcgtcacacattcttttgagacctgataacaaatattgttaacaatgcaatgataaaatttagaaattgtgtagccaatagagctggtggttctcacctaacattgttacttaggcatgaaatggtagtcttcccacttcccagtgtgataaaaatatgtggaaagaagaaaatactgtatatattgttataaaaacattgaattcaaaataatgtaaatagtaaaggactctttgatcatattagcaatttttgtatttgtcttccttttttgtctagctgttgtggccatttaagctctatatagtggagaatatatttttactaaaatgtgtaaaagtcaatggtcaaccaagcatgacttgaagttcaaatgattaaaaaaactatttgaagaatcattgttgttctaaatcataggttcaggtcaataatgataattggataatatctttgagtatggaaacatcataatatatatatacgtaaatgatgtcaaattatatcaaaattaaaagaatatggtgtatattactcgaatatattcaatatcattaattacagtcaaaagcataaccgtatcttgttttttctttttctcactgaattatatttgatattagatttggaaaggatacaatacatatgaaaatgaagagtttagacttcaaagagacacaaagttcgacctatgaggaagggttttttcgagaacattgcaaaaaccaaactaatcttaactcgaaactaaacgaagctttcgaagctcaccacaaggacttctcgcacaacaaactgtgaagacttgcttcaacacttatggcaataacaagatagtgaaacttggttttctccggaaatgatgcttctttttcaaagagtgcctaagtcaagggtttctcggatgaaccgtaaaataatcgagaaccacttaaacctttcaacgccacaacgatcaattaattaagctaacctttgcttaatacaacaaaagaagaactgataacgtaatccaagagctcaaccccaaactaacaaaatctaagttagtcgggaaagagaagctaaacccaaaaaagggagacaatagcccaaacaagagagataatttaacctaagctgctgatgttaccagatctcacgaagacaaactgatcagagcaacaagtttcacaaaagcagaagacatgaaccgtatcttggttatgtgattcaaaaaagaattgtcaattattcgatgaaaaatagataaaatatgactttatgcattaaccgtaactaatttagatatatgctttcaattattaaaatcatccaaaaaacatagtcaatctggttctgattaaatagtttgaaaattgtatgtcatgaatgggtttaaatgttgtaagaatatgtataatatcataacctaatcggctaatcaaattctccatttttaatttgtacgaatcagctatagtcattagttaacccgatctgattacattttggacatttactctcacacatatatatatcacttaatattatatacttttaagagtgtgagtgtctacaacaactacaaatgagtgaaagaaatcctcctgtggtggcatgactgtgacaatataagattgaaggacgtaaatgatttttgctaagattttgacttggaaatatgcaatatttgtctgatttttacttttgtaatgtttcaaaaacatttcatgttaaaaagttgtttttgacgggaggctcgagagagagggaccaaagatgtcgtgaatggcacgcgtttcttatccacttttctcttttgtactgtgttcaaatgattggtaagtacactctagtgtttttgtttcctgttaaattcttgtcaaaacattcagctttttaacttttttactggaaacagtaaacacacccacacactctctctatttacacacacacacactctatctaattacacacgtggcatagttattactttaggtgttggcccgtcaaaacgatatcttaattattaccatcgatcccaaagatgtgaattttgaaaaactataaacaagttggagaaatgatgatttcgatcatccctataaacaagcatgcttgtctttttgttaagtcttctatctctgacatgacgtcagattgttgtttagtagactataaggcctattacaatttggcccaactaaacgaacaaaaccggcccatatatatcactgccgaaaatatcaaattttctttagttcctaatgccttattgttttgggtagtcctggacattcggttatccattcggttatcagttttttcggttttaaaatttagtatccattctgttaatttgaaagtttggtttggtttcggttcagttttaaaatttaatatccattcggttattttattttgaatattttcggatttttggttatttttggatatttttgaatattttcgcttaatttcgaataatttaaccattttgtatatattttcaactttttttaattatttactatagaaataactaatattttgaaaatatatttatatttcggatattttcggttacccgaaatatttcggttattatccattcggtttcggttctttcggttataaatttagtatccattcggttatttttcacttttcggttcggttcggttaattttgtttcggattcggttaggtacattcggttcggtttgttagcccatgcctagttttgaggtgaatttgccacatgtcaacacttgattgcgtaagtaactcctacaaaaggatatttttgtggggataaatactcgtataggagatttgatcatacgaaaatcaaatctgtccttgaagctctccaataatgaagtcacaaagccataagccatggaatctagtcgccggaatcttctttccgatcatcactttcttcctctcggctcctcttgtcggccacgccttgtatctcttctgcatgcgtaacgaccacgtttactaccgcgacttccaaagtacgttaccacgtgtacaaacactcgtcagcgtctctctcctcgccttgttcctccttagcaacatcggtatgtttctccgaccacgacggctcagctacttcctagttattgtcttcttcataggttttgcttactccggtgtgtacaagatggaaagccggcggttttctccgacaccaatgtgtttcaagggagaatataataatggacaaggagaacgtaaaacagaacaatatcaagtggttaagatagaacaaagtcaaggacgcttgcaaagagttcacttgcggtttgtcaacagctatgccttgccaccgtatgatagaagattgttaccatctgttaaggtacttacgaatcaattactcttttttttttagaataattattatttattacttagatatatatcaaatctaatataggtatcaacttgttacaattttggttgggatttagattttatttagatatgcctatttttttttttagtattttagtttgatttttatatcgttgttattgtaaacaatttgtggatttgaattttaataattttggaggattcgagaggatttctttagttaaaaatatagaaatccaaatcatatggtttaaggtgagatttgaatggattttacaaaaattatatagacttccctaaaattatcaaaatcatttaaaaactcaacaaaattcaaatcactttaaattctaatttgaatacacccgtagtagtttttaaaagtattgttggtttttgttccaaaaaaatctttttatttatccaattaagattttgaaaaattagtttatttaaagtacatatattaatttgttttaaatatttgaagccgtgatatgcaagatttaataccactaaatcctaataagatatgacgaaagagaaaatcttttcttgatatatttttaaaaaagtcataatcttttgttcttgttgtttgttgtgttagactggatgctgcaatcggccagggaattgcaaactagagacggtcaatgcaacattgtgggttacaagaaatcgtgaaggaccacctttggaaacggcaatgatctatgatcgttacggtggcaatgcagacataaaggattattacgatatgtggagacacgagttaagtgtgttgtactatgattgtatgacttgtcaggttaggatcattaagtctccaaggctgcgcaaatggtggcagttcggtgttttcttatcttccctcacctctttgtttagatagatcacaaattcatagatgattttgatcgaatagattagcgatttggttcaagagagttgttattttttcgtctttagaatatatatagatcaataaaaaaaaggttacaaagttatcttaattaattaccaaaaaaagaagataactctctaaagtagtagagaagagaaagacttcacctaaacaaacatagtttcgtctataaatcatatcacagaaaacaaactgccacaaaacattttaacaaaaaggaaaaaaaatgtgaccacagagcgatttggtattcagtttctggcttcgaagaagtcttcttctttatctacctaagaacagattatcatcttctttgttctaccaaaaatcgtaagggggagggtgattggcagcaacagttttactcgcatttaatcgaccggtaaatgtggcggacgaagaggagagcagcgcggaagccaacggttccaagcatgaggaagaaaccgtaacaaatgcaagccatgtacccgaagaagaaggatgtttgcatgaaaccagacatgtctgatcttgcgtagtagtagtataagcagtacgcatatataaacagaccagtcgatccaccacataggaatgatctgcaacaaagaatattaataactataacaatgtaattttattatcaccaatccaattcaaattcgaatttaaaatctacggaaggatttagtagatgtgcctaatcaagccaaactgaaaccctacgtaagtaatcagtttgaaactgatactaaaacgaaacacaaaccatagcaattctaagctatttgtatttggtattatcatttggttttctatattccatataccaaaaaccgaattaaaaaaccagcttgggtggaaaaatttacctccaccaccattcatgatcttcagcagcgagttggaagtaagtaagggcaactgttataaaagcagtgacgatcaacaggatgatgaagacgatgaagaggatgctgtaaatggtatagatacgatggccccaaacactggcaaagatgtaatatagctcgatgtagatggcactgaaaggaagaaatccagccatggccatctgcggtacagcactcctgtaccatgggagtggcgggatctcccgaggatacttagtggtgcggactggagcttggaactcagctttgctgtttttaccggcaataccacccaacacaagtaaaggcgaagtgactagtgtccatatgaggacgatcactatgatggttccaaagggaagagcggcagttgcactgtatgcgattgcaacggtgtttaggaagcagaaggtgagaaatagtgggccacagaagagacctccagttagcagcaaatttctcacctgaagaggaagaacggtgagaaatgaaaagcttatcactttaagttgaaaagagtaaagggaaagggtttacatacccaattctttccttcgagttgacagtagaaagaggaggcagtgtatccggcaattccagatgtgagagcatagataacgaccaaagcagtgaagagtgctccacggttgtatggatagaacactccaacaagtgaaagcatgaaaatgaagatggtcctgatgacatatgaggtatattacagttagtaatggcaaagaataactaaagataaacgaaggaggctgaaaagagacttacagagtgaacaactgggtaccgctaccaagagatgcagcaaagagagatttgttctttgggaaccggaagacatctccatgaatgtatttccatccggtttcctcttgatcatcagcagcttcctcatcttgagcatacctttgaaagttaggggaaaagttaatggttggaaacaaaagtgtgcatcggtgagtcaagcacaaagagttagcattcaaaacttacttcatgaaatcattcttgaggacccgcatcaggatggttgcaaggaaaccagtcaaaagaaggacagtgacgcaggagttaataatggagaaccagtggatttccaagtgatgtggaagagaagaagacatagcatacttatccattcttttctcaaaagaagtctcagtttccttccacttcacagtgtacataaactcagcatcgacttccttatcctcagtaagatccacaagcgaatgaggatccattctagcattgatttcaatcacccgatccttattgtacaaaatctcaaactggatgtgtttgtagagaaaatatttaaactcgctaggatcagatttgctctctttgtccaccttcccaatgaatccccaaataggcaaatcatcataatacatctgaaagtaataatctttttcaacagctcttcgaaagtgttcaacttcttctctactaagcttctttttacagtacacctctgagtctttctcatctctaaagttaagcttgtatggagcactaacaagcctatccccattcaaaacctcaccaagagcttccttcttatctttcacaccctctacacaaaccaaaacaaatgcatattgacaccaaaatacacaaatccgaaaaaagtgaaaaaccacacataacagagacaacattgagcgtgctcgtacctggaatacaaaaggggagatcgaaatagcgatacgtctcactgcaacaatcatcaaacacaagtaaaaatcagtcatataacaatgcaatcgaagatctatcacattttaagaacacgaatcgaattttttcaaggtcagatacaaaaattcaataccaacgcaagcttctacagaaatttgcaacgatcaatttatcactcatcaaagagaatcacagatctaagctaccgacaaaggaactgagattagagaattggatttacctgggattgtgaaaggggccgaccttgttggcgtagagaggaacggagtcaccgtccttgtaacggtggtcggaggcatcggatctgacagtaccggcgccggagaagatgagagctccgataaagaggagcagcgtcgttggtaatctcatgatgatgtgtgttaatgtgagaggaagaagaaaatcgtgagatctgagtttgctttatatttttgagagcaacgcttatggcaaaaggacgattatattacttttatttattttatctctctttttaacgaattttcttctactaaatgcttaagaaaaaatattgcgaataaaaagcattatgtaagaaaataaaatctgcgacattttaatattttttttagaaattgaaatgattatttttatatattttatttttggttgttttcttaaatcttctaaacaaaattcgtattaattcacaaaattttaaattatttaatacgtttcgtaagaaacttgtgaatggcagaggcaagtgatataaactgaagcaaataaaactttctataatcgatattttttgttacaattgtcgttttttttttaataagtagcaattttctattggtagagtgattctctcgttcttgtgctttctactatttataggagttttattgcattccatgtgactataacaatcagtaatgttctttttactctttaacaaaatcatgatgatgaagatacaaataaaaaggtggtcaaaagaaaaaagatcaatagtgcctcgtttttttttttcacaatagtatctcgtttatgaaattgattaaagcaaagcaagtaaaaagtattatcaattggaatataaaccaaattttttgtacataaaatgaatgatgtagtaatttatatacctgattatcttaactaaactcaattttttgcaaccaaaccagataaataagaacactataaaattaagatgttaattacacagacaataattttatttatttataaagtttatttttgtaacagctctgatacttattgattttgcaccttctttgatggtggtggcgaatcatacactcatcagcgaccatgatatgtaatccatcaacgagttctctctgaatcttctcgcctggaaccagttttccagagcataaacataagccttagaacaaaacaaacatctactatcccctgaactactaatgatagagtaatcaatgtaaactcttttcctattgtagaatttaccattagacaaattattatgcatgttgttagcatctctactcttgaaaaatcttcgtaagctgattggaaaatcaaagaataacaaactaactaactaacaatcactactctataagcaaatcttgaataccaatagagattctttatgttggattctatctttgagcatttcattaggatcgacggttggtcgattaatcaatactaacccaaacagtcttttaacatgcacacttgataccttgtaggtgcttctgggtagcatgaaaatgataattggtgttattctgatatgcgaaattgaaaatgttgttgtgcatcagctaagcataattgaaagtttaaaaaatattataaatttaacgtgaagaattgaaaggtatcagattaatgttttggatcagccgaatagagtcaggctaatccaaattctcaaatattttcgaaaccttaaacacatcaaactccacgaagtaaacacactcacacacatatcaaaatccacattataaatgtatttttggtaggctagtcgtctaattctaaaatagccaatttacatttgcaattgtttattcaaaaaagtacaacagtaagaggtcttatcaattaaatcataagaaaaatatgtcccaaaatgtcaaaaaaccaactacgaatatttcttttccttttaaggccaaaccaggttttggaatacttattacaaataaactcaatttcaataaattcttgtacacaaattaagcactaatttcattgtgaagataccatagtcacattcacatctatatgacatcaatctataaaatccaaaacaaactatatattatatttatattatttttttgtcatcattatatttccattaatttatctaattctggttctaatatactcttggtcagaaaaaatataaacattgaagaattggtcggctgaaaattgtgaaaaatatatagcagaaaaatatgataatgttatcataaacaaaattaatagtaaaatttaattttaatttaacactacagtactatacacgtgtgtatgtatagctctataagtatttactctctttcagctatttattttttcagtgaacgagcattcttcttcttcctctgtgttgttgcttcttagatatattcaaataaaatgacgactgtaatcgacgcgacgatggcgtatagatttctggaggaagcgaccgattcgtcttcttcttcttcttcttccaaactagaatctagccctgtcgacgccgttctcttcgtcggaatgtctctggtactcggtattgcttctaggcacttgcttcgtggaactagggttccttacactgtcgctcttctcgttatcggaattgctcttggatctctcggttcgatttcgttccatggaatttctgatttcttcatctgttttaatccttgaagtcaacgtaatcatgcttaattgctaattcatgttgtttggtgtttcagaatatggagctaaacataaccttggaaagatcggccatggaattcgtatctgtaagtttttagtttcgaatttttcttctcttccatggctggctttgtaagaactatagaatcaatgttattgtgcagggaatgagatcgatccagaacttcttttagctgtttttcttccggctcttcttttcgagagttcgttttcaatggaagttcaccaaattaaggtttattcctctggctctaattcctagttaagcttaaaggttaagagaaataggtactgaatacttgcatgattctttagaggtgtctgggacaaatggtgttacttgctgtccctggagttcttatttcaacagcttgtcttggatcgcttgtgaaggtatgaattagcctggttggtattaagtagctgtcctgaaaacaaagaaagacaaatcgattattatgttatgaaactatacttgctatatgcaggtcacgtttccgtatgaatgggactggaaaacgtccttgttgcttgggggacttttaagtgctactgatccggttgctgttgttgctttgctaaaggagcttggtgctagtaagaagctaagcaccataattgaaggggaatccctgatgaatgatgggtaaatgacgttatcttctgtcatggtttggttagttttgacatttatgctcactcttcatgatttttaacaacaattccaggacggcgattgttgttttccagttattcttaaagatggctatggggcaaaactctgactggagttctataatcaaatttctgcttaaagtcgcacttggagcgtatgtcttgatcttttttcatctgttgttagtgatatcaagttgctgctgtgttcttatcagtccaacgtgttcttctgtctatttagtgtaggcattggtctggcgtttggcattgcatcagttatttggctcaagttcatattcaatgacactgtaatagagattactcttacaattgcagtgagctatttcgcatactacactgtacgtctttctgtagaccttgaattcctgtgctaagatattctctttgtagtaaaactgagagtttattgtgtgacaggctcaagagtgggctggggcttctggtgttttgacggtcatgactttgggcatgtaaatttcagtgatctcgttattttttttttccctttcttttgttatcatttaagaagtctcttctcataaaataactgtaacaggttttatgctgcatttgcaaggacagcctttaaaggtgacagtcaaaaaagcttgcatcacttctggtatttccagaacttgtggaatttggacttgtttttttatattgtaactctatgtaaaaggttgatctgtgtgatataaattttcccggtaacttgtgcagggaaatggttgcatatattgcaaacactttgatatttatcctcaggtaagggtaaattttatagactcatatcatgcttgtgcttgccaaccctaaaatagaagctcatgggtagaaaaaagagctattttactgcagtctactctttagcctggtgttgcaatattgactgtgtttctcgttttatgtttgcagtggtgttgtcattgctgaaggcattctcgacagtgataagattgcctaccaaggtgccattatttaatgttgatagtgtacagtatttttttcctagctaaagtaaattttgtgaacatagttttgtctgcattttcgacagttcactgttaattgaagatgagatctaagtcattacataggactcccacctgttatcatagttttctgtcgttgttaacacaccttactgttcatggtctttggttctcgaaggatcactaattccataacgtgaatcagttacaagaataagaaaaaaactggcattattggttacgaaatattgagcgaaagttaccactgtgctaggactgagacaattgtattctttcaccagtctgttattattattaagtacctgttagagatgtactgtcttggaaccatatattttttctctggaaccatatctgcataaggcacatgatatacttaactttaactattttttatattttggatctaacaactcttcacgacccaaatttcttacagggaattcatggcgatttctttttctgctatacgtttacatccaactatcgcgtgttgttgttgttggagttctatatccacttttatgtcgttttggctatggtttggattggaaagaatccattatactcgtatggtctggtttgaggggcgcagtggctcttgcactttctttatccgtgaaggttaattttaagaacatctgttaaagttgttcttctctcttaaatttctgcacaatgtttttttccagccacattgattctgtgctgacttactcgcactcatttgattcagcaatcaagcggaaattcacatatcagcaaggagactggaacattggtaagttagtctaaagatgttattgacaacttaaaatgattatgcaaattattgttttgtctcttcatattctcagttcttttgcagtttcttttcttcacgggtggaattgtgttcctaactctgatagttaatggatccactacccaatttgttctacgccttcttcgcatggatattttaccagcccccaaggtcaaaaacttctctcatacgaataactttccgagttttaagtaatcaaatatatgtgtaaacagagatttttttgcttatgctttgtattcatgtgtaagtgaccgtgttagcctgagtctgagcctttaagctgtatagttcaatagggtctgtatgttctagtcagtaatgtattcgaagaaccttattagaaaccactttccttttgacagaaacgaatattggaatatacaaagtacgaaatgttgaataaggccttacgagcgtttcaagatctaggagacgatgaggagctaggacctgctgactggcctacagttgaaagttatatttcaagcctaaaaggttcagaaggggaactagttcatcatcctcacaatggctctaaaattggaagtcttgaccctaaaagtttaaaggacatacgtatgcggttcttaaatggtagttatgatcatgtaccctccaatatactattttacctggtagattattgacactttgaaaattggttgtgtcaggtgtgcaagcaacttactgggagatgcttgatgagggcagaatatctgaagttactgctaatattttgatgcagtcagtggatgaggcgcttgatcaggtttctacaactttatgtgattggagaggtctaaaaccacatgtcaatttcccaaattactacaactttcttcattctaaagttgtcccacgcaagttggtcacatactttgctgtcgaaagactagaatctgcttgctacatttctgctgcgtttcttcgcgcacatacaattgcacgacagcaattgtatgattttctaggtatgtacaatccatactctgcagtctgcatcacactttgaaaacaatgactaagaataaaacttgtaccgtatcatcattaattgtcagagtttttgtttgcaagtatctcaacttagtaagaacaatacattaacccaaccctagttttgtctcatacttatctatcttctctacacaggggagagtaatattggttccattgtaatcaatgaaagtgaaaaggaaggagaggaagcaaaaaagttcttggaaaaagtccgatcttcatttcctcaggttgagagtcttgtcatttctttcgggtgacttatctttcttgcggtgaggcacatataatctttgattaacattggtttcaggttctccgtgttgtgaaaacaaaacaagtaacatattcagtgttgaatcatttactcggttacattgaaaacctcgagaaggttggcttgttggaggaaaaagaaatcgctcatcttcatgatgctgtccaggtaccaaattaaagaatctcattccttcaactatagtcttgtctcttttgtcttatgcttttggtcaaatctatctctgcagaccggcttgaaaaagcttttgagaaaccctccaatagttaaacttccaaaattgagcgacatgatcacctcacatccgttatcggttgctcttcctcctgcattttgtgaacctttaaaacactcgaaaaaagaaccaatgaaactgcgtggtgtcacgctttataaagaaggttcaaagccaactggagtctggcttatttttgatggcatcgttaaggtaacccaaaacttatcttttacttttaactcgtaagtctgtatgatctattaccttcataactgaatgttataacaatcctacagtggaaaagtaagatcttaagcaacaatcactcgctgcatccaactttttctcacggtagtacattgggactctacgaagtcctcactgggaagccatatctgtgcgacttgattacagattctatggttctttgctttttcattgatagcgagaaaattctatcactacaatcagattctaccatcgatgatttcctttggcaggtacgtctctattagaatccattttagagagactcatttcttgattgttaagttgcttcaacttttttcggttttttttgtttgcaggaaagtgcattggttcttctcaaactcttgcgtcctcagatatttgaaagtgtggcaatgcaagaattacgagcccttgtttcaactgaaagctcgaaacttacaacatatgtgacgggagaatcaatcgaaatcgactgcaacagcattggtttattattagaaggattcgtaaaaccggttggtatcaaagaagagcttatatcatctcccgccgcattatcaccttctaacgggaatcaaagcttccataattcatcagaagcttcaggtaattaattgcacagtacagcaggatcaaacctttttaaatgtcagcgaatgatataaatcgaattaaatcaaaaatgtgttttgtttttttgaccacaggtatcatgagagtcagtttctcacaacaagcaacacagtatattgttgagacgagagcaagagcaatcatcttcaacattggagcatttggagctgataggactctacatcgaagaccatcttcgttaacaccaccacgtagctcaagctctgatcagcttcagagatcatttcgtaaagaacacagaggtctcatgagctggcctgaaaatatttacgccaaacaacaacaagagatcaataaaacgacattaagtttatctgaacgagcaatgcaactcagcattttcggcagcatggtaaaaaagatctcaatgttgattcttttaaaggttgttatcgatgaacttctcgactaacctgaaggtttttatcttctgatattctcgaatataggttaatgtgtacagaaggagtgtaagtttcggtgggatctataataacaagttacaagataacttgttgtacaaaaaacttccactaaacccagctcaaggtctcgtttcagccaaatcagaaagttcaattgtgaccaagaagcagcttgaaacccgtaaacatgcgtgtcagcttcctctgaaaggggaaagcagcacaaggcaaaatacgatggttgaatcaagcgatgaagaagatgaagatgaaggaatcgttgtgagaatcgattctccgagtaaaatcgttttcaggaacgatctatgagaattgagatgtttgtaacataagaaaacaaaattgttagcttactcttacagttttactcattcaaatgtaaaagcaaaataatagtaataggcaaaaaagaaagaaagaataagctagtgtatgttgataaaagttgtgaaaatcatttaaagttattagaatgtatatgcaattctgcttatattttcgagttgtttttttcactcaaccgatcaattgttatcttttccctatctatcactcgtaatgtaataaatttgtttttttttctgggtaaaagtttaaaactatatctgccaatttgaaaacaaaattcgtataatattcgtttattcatatttacataatcagtgttttaaaaagcagtttaggcggacctaggcgcaagacgctgatgcgacgtctaaaatcgtgtagttcgcctaaaatcgtttatacctttagttttcaattaaatttatatttatataaatagttataaagattcatataatgtttgatatagttaaataaatattttttctaatttttgtttatgatttaatatatgtattttttttagatatttatatataaaattacatttataatatttatattataaatggtttaaacgtctaaaatcgcttagatcctgatcaccaccatgtctagcgttttcttaacattgatcataatatttctccactttctttatttctttggctacggtcaattttcttctttaataagtgggctaataatttttctgtatgttgtcaaaaagaaaacgttggaccccgactccactaataaggtcaaaacttcaaaattcgcataaaatctgtaactatccaactaagcttatattgccacggttcgttaaatacttcactcaagacaaacattcgaatgttttcattacgatttcaataataattagctgatgtggaagtttcaaattgtaaacatatctaattaagtctcacatatgttggaggttagttgacatgtgaaagatcatccagttaattctaaagtaaaaagtatggctaatccaccaatatgataaagaaccgaatttaactctcatcacaaaaacaagaagaatatcacaaaatcttaaccagatccacgatgagccacatgcatgcactatcttaggcaatatataggcatatgaccacttatcacttttcgtacagagcttagtggctcatgccgacataagcattacgtaagttatcgtatgtaagcttaaatcgtcaccgtttcatctatacatcgatcaagcaacggctatgatcttttttttgtgcaacacaaatgttattattgccatatactggaattaatgacatgggcttgttattattgcctactactatacaatgaactttgatttttaataatcattcaatttaaaaatcctgatactttttcaattaatgtattcttagatattttctttctttttgttctcttgtaatatgttgtattattatgagtttagtagaattaatatcgattctttttataaaaaaactgagactgaaagcaaactaacaaataataaattgttgacaaacaaaaaagaactatttaaaatatttcattctctttatctttttgccttttaccctttttatttttcttacttattaaaaattacatctcttccttttcttttttatttattagtggttctttattctttctttttttcttttctttattcttgtttaccaatcatactttatgtatgatctattagcttgtgaatattctcctaataaataccaaaatgctttgcttattgaaaaaaagtataaagagtaaaaatctcaaaatgcgaaatccaagaaattcaaaagaagataataaaacaattctcattagaatgatccaccggatattgtacaacattgatcttcaaaatttacctcgcctgatttttctatacaaaagttgaaagtttctctcatagccaatgatcactttagctttctaaaacctcatttatgttacacatatataacagccccaactaattaccaatataacacagtttaccccttagttctgattatagtaattgtacccctcccttgtgtttggatcttagtaagagccaccacagcttttccggagaggcccggtccacggccagagacacatggtcgagaggcaaagtctcctaccggatgtcgaatcggtcgagatggagccatcaaaattctctcgttgatatcatttagggttacatcattttctcgaccacctggtttcaccaatccaaatgggtacactagtttcgtgattagtcttttgttcttattaccacagttggatgaggatggttcggttggagatttttctcgaacataaattttgtcataagagacagaagtgtcgggagactcgtaaacattcgatatcgtctcctgacagtaactgactccacttatacgttcacctgtacattagtaaattttaaataaaaggctttattatatttgactaagtaattgtaacaaaattaaacttataaaggctggaaatgttttgtcatttggattcattcaagaggtctcaaactatttaagttttgggaccataaatatgttttcaaaaaacagaaatgtttggacgaaattattatcacaaaaaaaaacaaatccttttaaagtgctatgctatttcctttcttttttcggacaaaaaataaataaaattaaagactacttagcctagcctataattagttcaagctatttatttttcttatttgagttcttaaatgactaatatcaattaaacttaggtttcgaatgataaccaaatctcatagtgcggtgcgttttaaatagtaacgaaattttttgcatatatatatatatatatatatatatttgttactatttgaactgcactgtatccgcagttgaacgcacgtctccgttcggagctttaataataataaaccaaagccttaataataataaaccaaaagtaggtctcacctgtgttaacatgtggagtgacaaactgactattcaaacagctataactctcatgcaggccccaatcgttctgcatattcaaccataaacaattttcaaattaattagttatattgttaccaaaacatttggaaatgataattgaagaaaagttccaagaaaattaaagaaatcaaataaacctgcgaatcatcatcgttaaaagatttggacggatcctcgaacaagagacgtctccttttgcttctctcaccggactcgataagtgcgtcttcgaggtaacctgtggagacgtcggagtaatcaatctccggtgatccgaaaatatgttccggcgatctattcatgaaaccacatgtatctgcaaacatattacactttaataagaaagttcttgaataacttgtaaataaatacatgcgcgtcgattcatatattacatatgcgtatatgtatcaatattttacgattgaaaaaacacaaaatatgtttgtgtctatatattaatgtatatattaccaagattaaaatcgggcttgaagagtgatccaaggttatggatatcccaagtggggagagagtagagaagctcactcatctcttcttctttctttctttttctttcttttttttgttgtgttttctcttctgaattattttctgattgttttctatgatattaacttatatcactgcctatttatgttggtggattgtgtgtctaaagtgaatgtaactgagaataaacaataaacttggaagaaaaaaaaagttaagtaaaaagtagtggagaggtttagaagatgaagacgaatttgtactcaatacagtcaacggaaaaagaaataaagcaaaagaagaaatgttggatggatagtgtttttcctccttgagaaatgtaaaggtgctaaaaaaaattttctctttaacaaacacacattttatgaaaatttgaatttttcggatggatacacaaccccgagattaatacacaatcattaggttatatattataaccatgcaataatatatatatatatatatatatatatatatgtatatatatttagattagtaatatgtttgccatatatcatatggtcacaattacataatctgcatactatattaaatttatgtgactccgctacttggatggtttcaatagtaattaactactagaaaagacacacacacacaaaaaaaaaaaaaaaaaaaaaaaaaaaaacaagtattcgggtgatctatgttatctaacttcgtaaattcaaaaaacaaatgtatcaattttgttattatttcaacgttaatattagagatgttcctgtctaactccgtacatgtgtttgaattttgttagggtttggttagatgggggaccttaatgctaaaggttatggtatcacatcatgctgttatttttactgttccgctttaagcaaatttagtaaataatcttataatttgactcacacaagattaaactagaataagaaaatatcacatgtgaatagtaaataatgtcggcaatttttaaacgtaattgaaatttaaatatatataatggttgattgcgtgattaaatgttattaacaatattgtgaaatcattttaaaaaaatattaagtaatcaatttttcggaattaataatcatgtgtgtaatgagctatgtgcacataatctaagatcatcttcaaattatagttgttacaaatgattaaaaaaaggatataaaacacgttcatttcactgttcctgagttatgaagtggatgttgtgtttgttttactaacgttagctcagtggtaaaatattgctgatataacttttgctgatataagttataacttttactgttatataacgtttaatgttttacattttactgatatcaacgtcatgagtaaaaagaacatatatatggtcagtcaagattaacaatatttgttgtaattggattgttaagtcatagaaattagggatgacattttcaaaaagtgatgtatttcacagttcattaaaccattatcctcagtttcaaacaaaaataatgaactatgtaatatcttctttttcttcttctttagttgatcaaaaaagtcatgtatagaagaaattctgtctagcttattatagatcttgattctgttttgcttctgatttggtgaacaaccgttcttcttttgtatgcttttcttcattcttcacaatggtggggtcgtgtcacgtcctatcacgattaccttcttccattattacatccctttatttcaatttgttttcatatatgattttttgacatggtttgactttatcgatttgatttgataggatgatgaaattgttcggaatggtggaaactgttgaagcaatgtaatcactatagaataagtttggtcgtgttcgtttagtgtattagaattgttgttattagacgatgaatttatcataatatatagtaatggtttagtatgggtgaatattgttagaggtagagtaattatatgatattgtaatgagataataaactcttttgagttcatttcgcttcatgttttattttgtaggtaaaatccaaaaattttgatcggaaaacaaaattaacaaaagaaaatgttataaataaaactgcttttgtagaaccacgagacaattaactatttcgaactgtacaaaatagtgatgtgactacagtgtgtctaatgcgattgagtgtataatcataatgtcaatttaaaacctaaaaaatatttctttctataactatactactattcatttatattgtttccttcattatttgtcagtatgtattacttttatcgatttatcagtttctagacatgttcccccgagtacgattattttctttaatgggcccaaatgtaggcacgcttgtggggcccatttataaaagacgaaaaaatttgcgccgatattattcgcggggacccacattctttaattggcctctacttaaaataggaaagtattttcagatgcagaaaaaagaaactaattttgtttgtctaaaaaaaacaagaaactaaaatttgatttttacttgtagggtttctttaatatattcctctcttttatttttattttcaaacttgacaacataattaggttggctataataataatttacctataatacgtttttttattgagaataataatttacctgttatacgtgttttgcaaaaaaataaaactaaaactaaaaatgtttttattacagtgtttgaatggtctgagatcgaatggtgctgatttgctatggtgtagttgggcctttagctaaaaaaaaatttgtctgcacccaataatttgaatatacatttggcccatcattgattggtaatacttgctactaacggaacgccgttcttgtcagtcttagtgtccacaaacttcttccagtaggccgtgacttctctttgcgtctcctctggcgtcttcttaacaccgttaacttttccactagccatcttggcgtgaaccctcgcgggaagcgtatcgagctcgtgtagaaccttctcgaaatcggctaccaatctctcagctaaggttcgagagaaatcttctcggataacaactcgaaggaccgtgacatgttgcgcatccgcaggcatcgtgtaggccggaacgatccagccgaagcgacgaagcatttcggccacctcgaactcgttgtggcggctactatctttgagagaaaacgccactaacggaacaccgttttctttggagacgatgttaaaacgtcccgttttctctaatccttgtcttagtaccatcatgttctcgcggcaattatccatcacgttgcgatatccctaaaccaaacaaaaagattattagctattctacaaaaccaaaacttgtcaatttaggaacgtttaatcttatggaatgtatttagtacattcttggttttgaacttttgtagtcataaagtatagtaacaacttgtatattatactagtacgtatacgattggatttagtaacgttttagtttctttattgagttattatttacctcgaatccaagacgaatcaactggtagtactgagcaatcacttgacttgaccctggtaatatacaagaattaacaaaacattaatctataaatatatctaaactttacataagatatggtaatgtacctttagagaagttgagggtaaatgtgggttgatcagctccaagataattgatatggaagataagttcatcaggcaaatcggttttggttctccatacgacccaaccgataccggcgtaaaccaaaccgtatttgtgaccactcacatttatgctcttaaccaacggtaaccggaaatcccactccaagtccggatacaagaagggagcaataaacccaccactcgctgcgtccacgtgaatcggcgtatcccatctacaaatatattaaaccggaaccaaaccggttaaataaattaataatcagtttgttgttgtttatcggtttgatattagaatgcttgaatatctcacattataaattgttatatttttaagcaaaacattttttaatcagtatttaaaacaccattcgatacaaggaagcatataatgtaaacatatatggttttgttttggttaataagttttatattcattcaaaaaataaaatatttctaagcaaatatatctcacgttagaaattgtaatatttctaggcaaaagtatataaaattaatttgttagttggttttgattcaattacccggttttcttgtttttctcgactaaaaggtcgttgaggagcttaacgtcttcgaattctccggttagtgtcgaaccgaggatggccacgacgcatatagtgttttcgtctaccatttcaaccgctttgtcagggtccatcacgtaatatccttctctcagcttcacttccttaagctccacttcaaaataccttgcaaatttctccaagcaaacctgtattgaaccggaaattgagtcaatgtaaacatagacctaaaccggtttaaaatttaatcaatttttgttttggtttacctgaatattggctccggttacaatattaggtctatcataaggcagccctagggccttacgcttgttctgccactgtctcttaaaggccagtccggccaacatcactgcctccgatgaccccaccgtgccaacaccaatggcggcttcaccgtcacctaaaggcgcgttgaagagacgcgcaatcatgttaacgcatcgattctgaaggtcggtggtaacagggtattggtccatctcaacgttgttcttgttgatggattccatcatgagcttgtcacattctggctccatccaagtggtcacaaaggaggccaggtttagcctcgggttaccgtcaaacttgagctcgtcgttgatgatttggtatgctgcttccttagggatcgagttcttaggtatttcgaatctgatgaaaaattgatatatttagcttaagattaaaaaagaaaatacctcttatatagtaacacacattatgctcggatctttcagtgcaagtggttaatttcgttagaatctagtattctttcttatgtacccaaaaattaaaatctggaactatatcgtatattaaaaataaatatttctgtaataaatattgaatctagaatcaagatgctgtgtatcgtcgtctaggctaagttttagaactctagttaccaatgaaaacattaaacaaaataaaattgtgtttcaacttcttaccgtgagatagagttgcggacataacgggaagcaaaagttgaatggattgaatcatcggatttggaagctgtcttagataaaaccatcttcttgaaatgagctaaagaaaagtaaagggaaaaatgtgcaatgtttttgttttgtagttgaataatatgtgaaattagaagaagaggagcaaatggtatatatagggacgagaatggttctcttcgttttgtttgcaacgtgaaaggaagcatcgctggtttaaggattccttttataactttttactatcatttagtttaaaaatagtaaataaattatgggctactttaaaaaatttaaaatagtaagaccaataaattatgggctactttaaaaaatttaattttcaaaacgaatcatatcatttagtttgctatgtgtctcttttcccttattctcactctctcttatttttcgttaagacggactgcttaacccgctattctaaacctttattttctaaaattacttttgtataactgaaatctgaaaaatacaaaatactaaatatatacaaaaaaacacctaaaacactattttcttcaaagcaattctgtaattaaatactttgtgtatttaatacttattattttttcctatcaactcgaggagaggtgaagaaaccatatgtattttcaattaaaccatacttttgtttggtaaattatgttgtgtgttgcaaatcatgttggttaattttcttcatattagtttgtctccctttcttgttttgctttgtgacgtaaaaattgtctcattgttgtattgtttacactaaataggcctcttgtttgtatatgttaggtccctatatcctatcgagatagttatgttttatataatagagaaaaatccatcagaagcagttgataaatttacaggactcatatatagatcggtttagacgatttataatatgttacgaataaaataaaataaaaataaaaataaaaacaacggtcaaaaaattagcggaagccagtgagtttagtacttgaaactgccaaattaactcgtgctttttaatttgtaaatcaatagtaatatatttttctaaaaccaattcaaaatcaaagttgaatcaaaaatctgcctaaccgtccgaattatttaaaaccgcttaaactactgtataatataaaatcaacatgtccaaccatcgtacgtgtaacgtcgtctacgctgcgttttagaacactagttactaaaaacatcatacaagataaaattgtgtttcaactttcttaccgtggaataacgagaagcaacatttatgggctacttttaaaaattatcttaaaagtgaatcatattatatcatattcaatagaatactaaaatgaaatctctccaactaagtgtctcattattagtttattaattttctaaatttgtttgcaaaacgaataagaataatactaattaagactaaatttattgttatagactgatatgtctctttgccaaaaaaaagactgatatgtctaaaagtggctttaacagatttctgaaataatactgcatagagtgccactttatcacctttttaaaacgatatttgattcttaaactgcaaatatacaacaaataattaaatgtatatataattggtggtgacagcattaaagataaaacaaagttgatcttatttttatcagtgaaaagtgaaaaccagtgcggaatattaccatgttaaagcatatgtatcgaataaacaaacatattttaataagataaaatgtcatcaaaaaatatactatgttttttcgttgaaaaaaattcaattttgtatctggtaaaataaatgactatttttttaaaaatttttttaataaatgataattgattttgctgatttagacacaacgttaagtcataaaacaaaatggtcataggatccgggaccggtccaacagattttgatgcctaaagcatttaaaattcttaaacatttttagcccatttataattaaaaatcacaaaaacaaacgaaggcaaggttcaaatcaaaccgttcaccaaggagtcattaacatatgaaattcaataaatttgtgaatttttgtgaaagaaatataaatacttatacctttacttttttataataaatattgaattaattcgtgattctagaaacttgttagtttaatggttaatccaattatgtgtcattgtgtgttctttacacagaaaaaaatgttggtgaaaacaaaaacgtttttacatacccacaaaaatatatatatatatatttttcattgatttagtgtatatccattaaaaatcactctccatcagcaatatcaaatcccaaaacttaacaaaaagaaaaacaaaaaataatccaaacagcaaagaaagaaaaaggtccataattatggagcgcaattaaggacaaaacaaataataatattagtttataaaataatcttattagcaaattgtgttcttgttggtcttcttagtctccaacaacttcttccagtaggccgtgacttctctctgcgtctcctctggcgtcttcttaacaccgttaacttttccattagccatcttggcgtgaaccctcgccggaagcgtatcgagctcgtgtagaaccttctcgaaatcagctaccaatctctcggctaaggttcgagagaaatcttctcggataacaactcgaaggacagtgacatgctgcgcatccgcaggcatcgtgtaggccggaacgatccagccgaagcgacggagtgtatgggccacctcgaactcgttgtggcggctactatctttgagagaaaacgccactaacggaacaccgttttctttggagacgattttaaaacgtcccgttttctctaatccttgtcttagtaccatcatgttttcccgacaattatccatcacattgcgataaccctaaatcaaacaagaaaaacattattaattacacaataccaaaactagtcatgttaggaacgtttaattcaaagtatagtaacaagtaacaacttaaatataatacattctagtttctttattgaccatttggtaaatatattgctattttgagttattatttacctcgaatccaagacgaatcagctggtagtactgagcaatcacttgacttgaacctggtttatacaagcattatcaaatgtttagtctataaaacaattccatacaccaaaaatattattgaaagttatatatgttatggacttatggtaatgtacctttggagaagttgagtgtaaaggttggttgatcagcgccaagataattgatatggaagataagttcatcaggcaaatcggttttggttctccatacaacccaaccaataccggcgtaaaccaaaccgtatttgtgaccactcacattaatactcttaaccaacggtagccggaaatcccactccagctccggatacaagaacggagcaataaacccaccactcgctgcgtccacgtgtattggcgtgtcccatctgcaaattgtgttttagaacgttaaaaccggactccaaaccgattacaatcgatattagcttgtttctcggtttggtttaattacccggtttgcttgtttttctcgacaaggaggtcgttgaggagcttaacgtcttcgaattcaccggttaacgttgaaccgaggatggcagcgacacaaattgtgttttcgtctaccatttcgaccgcctttacagggtccatcacgtaatagtcttctcttaggttcacttccttaagctccacttcgaaataccttgcgaatttctcccagcaaacctgtattgaaccggaaattgagtcacacatataacttaaccggattgataaattcaattttgtcttggttaatatttcatcaatttttgttttggtttacctggacattagcaccggttacgatattgggcttatcataaggaagcccttgggccttacgcttattctgccattgtctcttaaaagccaaaccggccaacataatcgcctccgacgatccgacggtgccaacaccaacggcagcttcaccgtcaccaagcggcgcgttgaagagacgtgctatcatgttaacacatcggttctgaagctcagtggtgacagggtactcgtccatgtcgacgtagttcttgttgatggactccatcatgagcttgtcacattctggctccatccatgtggtcacgaaggaagctaggttcagccttgggttaccatcgagcattagctcgtcgttgatgatttggtaagctgcttcttttgggattgagttctcaggcatttcgaatctaatgatgaaatgatgatacattaagttaaaataacgaaacatgtccttccttatagtatataacacataataaatctacaacattaaccacggccaaaaaaaaaactatccaaggtttacatcattacatgttactattgttgacgaaaacattagacaaaagatttgtgttacaagttgttaccgtggaagagagttgcggacgtaacgagaagcaaaagttgaatggattgagacatcagattcggaaactgtcttagacaaaaccatgtcttctttcaacttcgaactttgatttttgggtttgaaatgaacaagaggaaagaatgtgtagtagtgtttttgttttgtagttgaagaagaatgtgtggaattagaggaagaggagcaaatggtatatatagtagagagaatgtgtctcttcatttcgtgttttgcatcgtgaaaggaagcatcgctggtccttatttatgtgctcctttttcaaaccttttccttaccaatgacttttcctcattataatatttagaccaatgaattactaacttttagaaacacgaatacttttattactatcgtatacaaattccgaccgtcatctttttattggatctttctaagttatcgtgaacattttattagtgattttgattttgtttatttagcatctcccgcgatttgatcaatttcacacttacataattatgtgaatattacaaacgcgttacgcgtaaaatgtgaatatagtactagattatattgttttcgtgattcctttttgctgtcaatggaatttataccaataagctagaaaccaaattcgaacttatattggtatcaccactaaaggacattgactttttgttgtaagatctcatattaccatctctaaagtataaaaattcaaataaacatcaaacccatggtctgacctaattaaacaaataaagttaggcgatttatcaaacctcccacatgtttagactagctttagaatagccctagcttgggttaattttgttgaaaactagaatccactagccctagcttgggttaattacgttgaatactacagcttgatcagcattgtttctagattaccttttttttttttttttcaattgtacataggatttacttatattttcgaatggatacatgaaacaagaatacttcatcatatatgtttatattttttaaaaaatcagattttatagacaattctattttgactattcaggatattattaaatacagttttcattttctttatctatcttgtttttattttttgactgaaggacttgtcagtaacaaaagtaaaacaacaggtttgttatatcttgtttttttttgtctcccccaaatgattttcagaaataaaaatatttgtgagtggcactcatacgtaattaagaggcagggaatggggcataactggcagtaagaaacaaaagaagaaaaatagtaaaagtcaaaagtcgacccatcagtcactctctaacgcgttagtcaatgggaaccggcaaatggagaccgagacgccactcgccgaaccggcaattatgggtaaccgccaccggtttacttctctaaagttctgactttccttaattattgcaacacgaattttgaaatggccaattaatacatgctctgttcggttttgtttgtactagtcaactattagcgaccgaattattgactattcaatagttcaacgttaaattattaaggacaattcaaaactattcctttcatattcaacatttttatttagagacaaaatcaccaatccataatttaatttatttatttattaatcatttaagcggttcgaaaactatatcactaaaatcaattggtaaaccaataaattacaaaacgatcatgatttactagagcttctcgtttttgaggttgaagactgttggtctcccaaaaaaaaaaaatcaatttaccccaaaactatttttattttgcattaattaattattatcataaaactttattaacaccataaattgcatttggtgcttcaaaaaataaaatagtatttatttacttaattccttaccaaatattttatatccaagttgtggaggtcataaaattggcccaacaagtacaaattaggaaacccactaatatttaaagcccaataggtccactcaattttgcaatttcttaaaacgtgttgttaacaagaacacattttatggtccagtggtcaccgccaccaacttctcgacttcgagagagacaagagtaatccaacgatctggttgatagtggtaacactgttccaatgagcattttttggcatatccctcaatatatctttattgggaacatctagcgttttgttctttcttagtcggcttgattttttctatgaacaatctctagatgcaaaatttgtgtagtgcttggactcttcactcggctcattgattcttacacttgttgcatatttcacgacaatgaaccttagtaacggtcatcttgattactatttttggcttttggtctgtcttggctttgttaatttaccggtttggctagaaaggtttcgtaagatttgtttgatgtcttctttaaaacttgaagtctctaacttgtttgataacttttgttgtgttaggggaaaagtgtgctatggctcaaaatttgcttaatgcttaagtctaatcagattaataaagtttgtgtggttttatattccctctttttttttataacattttttaaagaatgtggttctgtggtgagtgaccactcacaccaccaacaacaacttggtcagtgggaggatcattttatttgatccttcgttgagaagcttaaatcagctttacgtgaaaattgtcatgttgaggagaaagtaaaaaatggcttccattgatgaagaaaggtcacttcttgaagttgaagaatctcttatacaggttcaacctcattgtcattgtttctttagtgttttggggtctaaatctttgttgactaattcgtttttctccaggaagaagtaaaattatatgctgaagatggttcaatagatattcatggaaacccaccattgaagcagacaacaggaaactggaaagcttgtccattcatttttggtaaacactttgttttatttcacttgtaatgtacttgttgtattctctcatgttctgtctttaatctccaaaaactgatatctatgctttggttggtgcagcaaacgaatgctgcgaacggttggcttattatggaattgccaagaatctcatcacgtacttcacaaatgaattgcatgagactaatgtttctgctgctagacacgtcatgacatggcaaggaacatgttacatcactcctcttattggagctttaatagctgatgcttactggggaagatattggactattgcttgtttctctgccatttatttcaccgtaagcattttcttgaaaaataactttgctttatgttctgttcttggcttgatgttctgttctttgatgttgttttaagggaatggttgcattgacactctcagcttcagttccgggtcttaagccagcggaatgcattggctctctatgtccaccagcaacaatggttcagtctacggttttattttcagggctttaccttatcgctcttggcactggaggaatcaaaccatgtgtctcatcctttggtgctgatcagtttgataagaccgatccaagcgaacgagtcagaaaagcttctttctttaactggttttacttcactatcaacattggtgcttttgtttcatctactgttctagtttggattcaagagaattatggatgggaattaggattcttgatacctaccgtgttcatgggacttgctactatgagtttcttctttggcacgccgctttatagatttcagaaaccgagaggtagcccgattactagcgtctgccaagttcttgtagccgcataccgtaaatcgaatctcaaggtccctgaagactccacggacggttacaagaaaatctttttccctctcatttcttgtttgaattgagcattagtctattaacggttaaataaacgggttgtgatatcaatgtacaggtttcttgacaaagcggcaattatatcagaaggagatgcaaacactaacccgtggaagctatgtaccgtgactcaagtcgaagaagttaagattctgttacgtttggtccccatttgggcctcaggaatcatcttctcagttctccattcacagatttacactctctttgttcaacaaggacggtgcatgaaacgaaccatcggcttattcgaaatccctcccgcaactctcgggatgttcgacactgcaagtgttctcatatctgtcccaatctatgaccgcgtcatcgttcccttagtgagacggttcacaggcttagctaaaggattcaccgagctacaaagaatggggattggtctttttgtctctgttttgagcttgacatttgcagctatcgttgagacggttcggttacagttagctagagatcttgatctagtggaaagtggagacattgttccattaaacatcttttggcaaatccctcagtactttttaatgggcactgctggagttttcttctttgttgggaggattgagtttttctatgagcaatctccagattcaatgagaagcttgtgtagtgcttgggctcttctcactactacactaggaaactacttgagctcgttgatcattacccttgtggcgtatttgagcggaaaagattgttggattccttcagacaacattaacaatggacatcttgattacttcttctggcttttggtcagtcttggatctgttaacatacctgtttttgtcttcttctctgtgaaatatactcatatgaaggtttgatctcttcttctggctcttgtgtgtactttcaaaattgtttttttttaaaccagcaaatcagttatattaaatcataacggtttacatgatacatacaacaaccattcaaatataactattgaaacaaataaaggaaattgaacacaattttgatgaagaagtgtaagtgaccctgctttcgaaacggaagccttacaggcaacaaaataaatctgttaagtcctctcatcatacactcgcaaaaagctaacatcttatagatgaaactcctaaatgctttctgcattactttaataaaacgaagaatttggtaagttgctcgaaatggttctgaatcatgctttttgaaacgctctgcaccggttaatgactatggattttccttttacaagactcactaacggattcaatccattagttttcattttctcttgcgccaatttgtcaaatcttcgaagacataatattcccggaacccatattcgtcgaccgaagcaccagttgtgaggaagagtcgctacgagcctcatttgatcttcggctaaaacctcttgcaacggttcactaggaagcgcaccagagtcaatcgaagattggcaatgtattgccaaattgacatcgcaatgggatgttcccatcacagacataaaagatgcttagcggatccgtcgaacaacttctccacaccggcatcgaaatagaaatttaccgttcccatgaagagaaggaggcaaagaaatcggctccattgtaatggaaaccataagaaaattttatgaaagagagacatggcagttactatgaaatgattaaaccgcaccaagagagaagagaacaacgcactggtcgtatgtttgatgcaacatacgttggtgatggtgcccatgatgtttgcgacaagatctgcttcttcatggtgatgatggtcacaacaagttatgttaatcttgcttgacgacggatcgtgatttgttcgagacaggcccgtctctgggggtggcaaggtaggcaaatgcctagggttactaactaatttcaaaaaaattgttaagactaaaaggccccaatatttcaaaaaaaaaaatttactaagaaattttattttattttgggttttgccataggtcccataatgaattgagccgggagactgtttggtcagtttcgtcacgacagattttggacaacccaaccaatggtgtaatgagtggcaaaaccagttctcgcggccaacaagatgagatatccggcgaaaaacatgaaccgacaccaacgtaaggagaagagagagaaagacgataatcgccaaaataatcactcacaaatttgtttttattttattttaggggaatttagttaaattttgaattattatagttcttggattcagaagttatttacgtcaatctaagatttgagttaatctaggcaaatcttagtattatttactatgtaaatgaattacattattccaattagagatttgttctaacaattttgtagttattttaatcttaaaagtttgaggctttgagccatggataataacggaaaacaattctcaaataaaaaaataacaaagaaacattaaactatatagatatatacatcataattcacgttgattccagccactctttatgacggttacaaagaaaatatggaaacagaacttataaattcagcgcacattgaatttcacaagagtcagaagaaatcgatggagaaactccttacgatcaaataagtttctttgtccgcaagaaaagaaatcaaacgaagaagaaaagagtttgagaagatccatatacctaacgaaatcgtcgaagaaatcttggtgaggctgccggtgaaatcgctcacgagatttcaaactgtgtcaaaacactggagaactctgatcacgtcgaagtatttcggaaaaagacacatggctcttgagaaaagcaaaggatgcaaactcctttttgtttgtgatgattttgtagatcgtgcagaggacactctgtttttaaaaacagttgccttggagaagacgtcagtttctgagggagatgaacaagctttcgaattcgaaggatataaggggtttctcgatatttccgagagctgtgatggccttgtctgcttctacgacactacaagagcagtggaagtaatgaatccggccacaacaatgttcatagaactccctctatcgagaatccaacagctttgtatatacaagccaaacccggaggtggagctggagccagttcaagatccaaatcctgttctagacccagtcatgacatgttctcagattggagttgggaaagacagcgttagtggaagttataaactagtatggatgtataatacttctcctgctactcctcctacgtgcgaggttttggatttagatggaaaaaaatggaggttcgtgaatactacttctcttgatcatcatcagatcttgtgcgatcagaggccggtgtttgcaaacggatcactctactggctcacgggagatgaggaaggatatgcaacaacacaaaccaaactcatagttttagatttacacacagagatgtttcaagtcatccaaacaccgccttttattacccgtgatgcctctggtgacaagattggtttatgcaatcttgatggtcgtctctgtatttcagagttgaagaaagattgcaagcaagagttttgatggagagttgaagataacaacacatgggagaggatcttctcggttgatttggtttctacttccacttggtttggtggtatcaccaagcagcctctcacacctttaaccatctccagggacaccaataaagtcattctctcacttcgctgtcaagataatctcgttgctctcgatcttgatccaaactcttcagtttgccatttgtatttttctggttactacggcttagtatgtccttattttccaacttttgtcacttgccactgaaattttagcaaagtttgtagctcttttctagacaaaaattaaaaactggccattatattatatggtctttatccaataacttgaatgaaaatcaaattgtatgacttaatatatatactaactccgttaacacaatgctcggtaggattctgaaagaaagaaaccaaagaaacactcactactattaactccttttaaagtaaaaactttgtcataccaaatcaaacagtatgtagagttaacggagcataaaattttgacaatattgtcgtcacaccactcagtgtaaaggcgaatgctagtaccaagagcaactccaaccataacacaccaaattaggtgttaatgccatggaggctcttgtgagatacactcacaaaaaggcttgatctctcttatctggcattgggttaatgccatggaggctcttgtgtgtactttcaaaatgtttgggcctttgtgttgcaaactgaaatttatggccctctgttttggctttaggatatatttacaacataataaattacacaattccaattagagatttgttcttagttttgaggctttttgacttaaaatttgagccatgaataatctttcttcttttttcatcatagataatcatagatagagtatagaaatattatatttgatttttttgtgtgtgtttaaacctgaattatatttgatctaagactaactatttcaactgattatgagtccatcaagtgaaactacctataccacatacgacatttatggttttttttttaatcaaacaaaaaaaattattgtatattttggttaagagatatgaagtgaaatcacgtgtgagtaagaagaaagagacatgaaatcatatattaattaattattgtaaattttgcacaaaaaaaagaattaattatatataaatatatatatatatatatatatatatatgtgtgtggtatctacataattaattattcttcttgtgattgtaatattttgtaatatttttcactatatgtaaatatgtgtgagttattcgacatttatggttttatagtttccaaaggtatcaatatcactgtttggatattgaagctaaagtaaagagagaacgtaaacgaaagagtagagagaaactaactcagttaactaataaaaccaattgtacaagtagattgattaattcaagaaaacaactaatttgttaacaactccgtttaacaaactaacaaactcacaaaactaaaactaaaacaaatttgttaaattattatatatttttaacacttttatgtctttgtagtatatattattgaattttcttgtcaagtaaagtttttggatttgtttggataaaactgggagtttaggaaaatagagcaaatcagcaaaatgcatcaaatgaaaaaagattgaagatcacgaccgaccttgacaatcgtaagagtcagtacataagatgtccagaactgatcggttacatacttgtaccgatcattataaaaaatgtttcttagtttaggattccgactcattgcatataaattcttaacactttgtaatcgtataggcagattgttttgtttttttttctgtgattatctagtttttctatataaaattttataaacaaaatgatcgtttgaagaattagagcatatttgtcatttgttattttgactaatccatctccattcaaattgtccaattatgtttagtcaaatgagtttgaaaattttgcctaatttaatcatccaaatgagcaaaagaataaagccacacattacttactaataatattaaagcccacattaaaataatttctcacgtaaaaaacaaatacttacacaaacctatataatctagactctacttcacttgtttgccctaaaccatctatcatctctctttcaattcatctacaccttatttttatatttctcaaatacttttcgagaaaattatataccctttttaatatacgacgaatgaaatcgcaggaagataatcttctacttgttcttctactcgaggggataaaaaattacggacttaagagatgggataagatactagcatcacttcttctatcccagcgaagtatcgctaaatgtaaaaaaaaattctaatctttcgttaaacgaaaggtaaattattttctcgaaaaaatttgtgtatagaattaaaggttttctttagtcaatagctaatcaatcttatcatttattttctactagtttcttatttgcacaatacatttgagaaaattatgttatgttttcaagagttttgggtttttgtagagtattagataaaatcaatattttctctcttgagactagtttcttctttgcaccatacatttgtgttctttttcattttctcaaagctgtttgttttaccgaattttctcttgggttgtggagaatattttttttttttagtttttataacaccttatcttatataaaaacaaaagagtttgtttttacaagggatgatggatgatgaatctatagatggtcgtagtaccacactctctatggactcaagttgtggagaatctttttttttttagtttttataacaccttatttgatatagaaacaaatgattttgttcttacaagagatgatggatgatgaatctatagatggtcgtaccacattctctatgcaccctatgaatcaagttgtggaatcaatcaaagttggccacatatagttatgaaatgattttgtgataaaaacacaaattaatttctatgtgaatcacaaagaaaatatatatatatatatataattcccatttgaagtttaagcacagaccttagaaaaatatgtaaacaaagccgatgtctatagtccaataaaaacaaatttcgccgggaaaaggaatataaaaaatttgtcacatttaccaaaaaataataggagagtttatatagtttcaacgtacaattaatgatctaggttatcgagttttaatttccatttctcctaattttgctgacttgagctacatattattgagcattcttgttctttcagggtttatagagagattggctgataattactgtttgttatctgagtccccaaacgatttactgatatcaacaacgtattgatgatgtattgttttagaaacacatatatgtaaaaaaaaaattcttgattagagtgatatcaacaacttgagacatggacaggtaacaggttgatccacaattctatctttacgtcataataataacaaaaaattcgtaaaaagatgagttttgttaattacttctcttattataatcaaagttttgatttttattttccaataagtcgccgggaaaagtaaaataaaaagccgtcacgtctccgataaataatagagtatcgttagataggtagcttcaacgtaaggaatctaaattggttcagctcaaaaaacgaaaacgatgggttccatcgaagaagaagcaagacctctcatcgaagaaggtttaattttacaggtttgttcaatttcaattaatcacttaggttagcgaattttgattttactcaattccaaaatcttgactttagattgatcttatgcattttctttctgggtttattgagatcttttctgggcaatcactgttttatctaattgatgattccaatgtttgaattttgcaagtagatatagatcaaagtttcgagctttgatacagttatagtttagttagctaatcaaaaatgttttgtgaatttgttttaagtaggaagtgaaattgtatgctgaagatggttcagtggactttaatggaaacccaccattgaaggagaaaacaggaaactggaaagcttgtccttttattcttggtaatgaatgttgtgagaggctagcttactatggtattgctgggaatttaatcacttacctcaccactaagcttcaccaaggaaatgtttctgctgctacaaacgttaccacatggcaagggacttgttatctcactcctctcattggagctgttctggctgatgcttactggggacgttactggaccatcgcttgtttctccgggatttatttcatcgtaagcattgcttctctgtgtaatgtttggtttggtttgtttgctcctgattactgataggtttttgtatttgtttaggggatgtctgcgttaactctttcagcttcagttccggcattgaagccagcggaatgtattggtgacttttgtccatctgcaacgccagctcagtatgcgatgttctttggtgggctttacctgatcgctcttggaactggaggtatcaaaccgtgtgtctcatccttcggtgccgatcagtttgatgacacggactctcgggaacgagttagaaaagcttcgttctttaactggttttacttctccatcaatattggagcacttgtgtcatctagtcttctagtttggattcaagagaatcgcgggtggggtttagggtttgggataccaacagtgttcatgggactagccattgcaagtttcttctttggcacacctctttataggtttcagaaacctggaggaagccctataactcggatttcccaagtcgtggttgcttcgttccggaaatcgtctgtcaaagtccctgaagacgccacacttctgtatgaaactcaagacaagaactctgctattgctggaagtagaaaaatcgagcataccgatgattgccagtaaatatccgcttcattgctttccagtaatgtatagctttacttggtttaacaagttattctggtatgatgcaggtatcttgacaaagccgctgttatctcagaagaagaatcgaaatccggagattattccaactcgtggagactatgcacggttacgcaagtcgaagaactcaagattctgatccgaatgttcccaatctgggcttctggtatcattttctcagctgtatacgcacaaatgtccacaatgtttgttcaacaaggccgagccatgaactgcaaaattggatcattccagcttcctcctgcagcactcgggacattcgacacagcaagcgtcatcatctgggtgccgctctacgaccggttcatcgttcccttagcaagaaagttcacaggagtagacaaaggattcactgagatacaaagaatgggaattggtctgtttgtctctgttctctgtatggcagctgcagctatcgtcgaaatcatccgtctccatatggccaacgatcttggattagtcgagtcaggagccccagttcccatatccgtcttgtggcagattccacagtacttcattctcggtgcagccgaagtattctacttcatcggtcagctcgagttcttctacgaccaatctccagatgcaatgagaagcttgtgcagtgccttggctcttttgaccaatgcacttggtaactacttgagctcgttgatcctcacgctcgtgacttattttacaacaagaaatgggcaagaaggttggatttcggataatctcaattcaggtcatctcgattacttcttctggctcttggctggtcttagccttgtgaacatggcggtttacttcttctctgctgctaggtataagcaaaagaaagcttcgtcgtagtaatgctgttatctatctactttcattacatacaaaagtttgtttctttcaactgtaactgtctctgtatcaataacaacattgctgtgtacttttcctttcaatttcaaaagtttaagtcgcatttgcaatattataaacaattcagggttcgaatactaaattgagagaaattgtccataggcttagtaaatcaaatgggcttttggcccatatcaaacgggcacaaatatgacccggagaagaagaatgttccgggtcaataaaatcgaagaagaagaagagagtatcgttgtgaggtttggggatcgcgaaaatggaggttccaggttcatcgaagaagatgatcgcaacgcaagaagagatgtctgcagctaaaatagcacttggatctagagatatgtgcgctcatctcttgattccgctcaacaaatgtcgtcaggctgagttttaccttccatggaaatgtgaagacgagcgtcacgtttatgagaagtgtgaatacgagcttgttatggagagaatgcttgcgatgaagaagatccgtgaagaagaagctttggctaaacagaataaactacaaggaaacgctgctgttcctcttatccctaaaactgctaatgcttaggattcgattccttctccaatttgccgattccagattccggttagtctatagtttttcgatttcttgtgttttggttgatttgattgaattggtttgtttcttctgctacatgatcagatcttcgtgttcttcaaattccaaattagggtttcattgggaataaatgagattgcttgttcaattagatgtctaatgcattatcttggttttgaattgtgaattctctcgtcttagcaattttgttgcctctgttgtgaacatttgactacaattggattcaatttctcttagactgcaatcacaattgttctgtatcaatcatgttagagaaatgtctggactttgtacttcttgttgtaaagtatctcaatgatatctgaagtttggataaggaaaattccatcattgactggattttctacagattttgttttttcatgatgtttccttttcaaagcttaatagataagtctttaagtaatcagtagcactaatttgctggaacctttagactatataaggatttaagtgtgttttactgattaacaggacacaattcaattcgttagactatatcttttatgtttgcaagttatatgttcgatgaacttgtaaatagtgtctcagatatcatgactagcaattgttacagtgactttgtgttacagacccgtagaggatataagagtgtttcactgcttaacaggacacaattcaagtcgttagactatatcttttgtgtttacaacttcttttgcccgttctctgttttaagatcttgtaatctgatatcatgactagcaattgttacagtcgctttgtgttacagacccttaaaaaggatacaagagagtttcactgattaactagacccaagtctattcgttagactatatcttttatgtttgatttatgatctcacacttctaggctttgaaattcttatgattgatatatatcttttgtgaacttgtaaattgtgtctcagatattcatggctaagaattggtacagtcactttgtgttacttataaatccgtgagaagaattgtataattacagcaccaactacatacctgtgtctaaacgttttctgctttgttgttttggtattttatgtcacaacagctacagaacaaatctcttaatgtctctcatcttcttgttctcacttgccattgagtactcttgcatgcttgtgtgattctttcctttttcatatcgttcttatgtgtttcactacttgttcattgtatatgccattatgatttgacaccaatgggtgttttctctgttataaagatagacccctaaatacttggtctaagattcttcaacatgacaatgattttgttttctcctgatttgattgtttattcattcttctgagtcctaattcacactctgaaaatatttggacagggattctctggaactgtgaagatggtggggactctgcttttcaatctttttcttcttgctagtgatgaaaaattgttgctacattttcagatgtgaatgttcaagattctctatcttttttttttttttgaactctttttaacttggagtggtttcccaaaaaataagatgcaaaactcatctttttgttggttttctatctttaatctgtgagaaataaaaaatatatatgagatcactgacacattgcttatagaaccaaatcacttcactggaagaaccatctaacgaaattagtgaaatactagaagtctaaacggtaatggtgattagaggaatccgacagaaaatgagttgtcatttatgatagaatcaaaagaggattatagatacgaaaaaaagtataccactttgtagttatatattccttgatatgtggaaggcataaaaacatggaacaagaatcgtagaagttacgatagattggctctcatattgagagtcatattgataggaggtggttgatgttatctttaggttggccgcgagcatttttggtaaatctcatccgtagttgcttcagaaaagaggacttgttgattctagagattagtagtttaaaagggtttgtgcctttgtttctgcttttagttgttgggttcgacctctttcgatttaggtttacaaatctctgttttgtgttttcattaattacgttttccttcggctttgactccggaaacatttatgtcgttcgccggttttagttttccttttttgggggttgtattctaccttggttgcacaacaagtttatcaataaaatttcatatgaaaaaaaaaaaaaaaaattgcaaaagttacgcttttgaaagaaaaagaaaaaaaaaaggaataaaagaggttatgctaagaaaacatatcaaatctaattccaatccttaaggatgaaaagtcaagagttgtttggtcctacttccaataattatgcactcacactactctaaaccttttcacataaccatgcaatgtctatatctatccatgtgtacattgttgtatattatattctctgtcttgtaatttatatattagttgtgtaatttttttggtggcccaaccattcccaaatcaaacttttaaacaactctctttcacttttgtttaatgttattttaggtgtgaaaaggctaattcttctctgttctctctaggtgtttcatggattacaccttttatattactttaaccatcttagaatttgccttgttcttgcatgtgctatgattgaattcaatcaatgggtgatgagaaaattgacccaatagaataataaattaacattgataatcgtcgaatggttcggtgagatttgcacatccaaattttccacacacaaaaaagaatgttatgttttttatagtccaaaatccagttgggttacattatcttacatgtatgtacaaagttttataatattaataaaaaaacaagcaaagagaattattgaatgttttgattgtggtaaaagccatgaatcatggacctccacagtcaattactcattcaatttctcttggagctatttgtctctgccagactcatttaatgtattattttcatttgcttccactttctctcatacatgtattagtactaaccattttgatttttgagacttgaactctcggttagacattttatccatccatgcaattgtgtttatcgatcaatgatcatcagtaggataataaaaggctttattagtgaatatagtaaaattgtttcactgataaaaccttttggaatgtgtttacttgattattttgatcaatgatcataacctaggtagctttttgtattattcttctagtcaatatataggtaatataagcaactcgtgtgtctttgacaagctggtgactgaatattatattttaattaccgtctaatcaaacactaaaccatttttaaaatcgttaaagcgaattttggcatatatgcagagaattccacgtttttataataatttagagaatgtgcataaatgagaagaaaatgcaaagcacaataggctacattttaaaggtcaatgacctcactttgtgtgtagattttattatttgattgtttttttcgttgggtatagaaatgtctgatttatgtgtggaataaagacgacgactttgttaaattataaattattaaattttgttctcttaattaatactcaatcggctttttcttatttttttattattatggctgataccacgtaaaccacgagtaagtatgtagtacaaatcaattactttctaatactacataaaaattatatactagtacttaatttcttacaagaaatacatacatcatttaaaaacagtatttgatgttaatataagtagttaatagtagaatagctgataaaataacgtgatttatgtccacaattcgttgattaaaatattgaatccatggttggaaaaaactggcgaaatcagtaattattgtcggctaccatatagggacatgatggttttggttcgtcttccatgtacaccaaatcagcaatgagaaaaagaaaaatggggaaaataaataattcttgttataaatattatcctaagatttattatcacttattatgggagtgaaaaagaaaacaataagaaggaaaatgaatgggaaatgggagaaaatgtaaaggaattaggggaatgaagtcaaaacggtggtccaaaagacataacgaaggaccattgtaaaattgtgtgatttatttgaaatcagaaagtttaacacgaaaccctaaaaaaacaaaacaaaaaacaaaaataggaataataattatgctatatggtcaaagctaagcagttgggctattttcatttaaatttattcgttttggtctaaaacctatcgtgaaaaaagtgagaaagtaaagtttgaggtactgtggaggaaacttcttcatttgggtaaatcccaaatccctataaggtaaatattatgtgttcttacaaaatttggtttttctatgacaagtatattcttttgaccagctaagctaacaaatgtatgttcaattggttatatatcgatcggggcaagggtaatactcgaatctatgttcttttcatgcaagttatgtatgtagccttgtgtagttctctggtacgttgatatgcaatgattctctcgaaaactatttaaaaaaattatttaagataataatgaatggggtcacgagtcaagactaatgtaaccaaagtcaaatggattttcgtatgattactacttttgtaaccaaagtcaaatggattttcgtatgattactacaagcttgtaggtcaaaaaacacatgtcacctctctgtttagtataataaaccaattttataacatcattctttttatttgctagtttaatcgtctaaataagtgacccaaccataaaccatatcagattatgaaattttgactttacgatagtttacgtatcctcaaattcctcacgtatatgtcatgaacaattcttaaacaacaaaattataactctcttttaattaatgtagttttttcgtaagaactcaaattgatatttaacaaaaaaaatgaatgaaacatttctcaagttttaataattattttttggaattttgcaaaacatatatagagagataataataagtatgaatgaatccaaaaagagacaaaaagaatagatggaaaaagagacagtcatctttaagaaagaagccaaaaacaaaaacttgctcttttaatcccaacccacacacctctcaaatcctcctctcctcgtttctctttctctcctcttcacagaaccaaaacatatcaaacctttttttctcttgggtttaagtaaaaatcgaatctttgtgtcggtttttagggttcttgaaacgatatgggtaagtctagtggtagaaatggtaacggaagctttaacggcaataaatttcacggagttagaccttacgtacggtctccagttccacggcttagatggacgccggatcttcaccgttgtttcgttcacgccgtcgagattctcggtggtcaacaccgtaagtttattatactttttttctcttcaaatcttttgtgaaaaaaaccaaacttttgtgtgtttgtttgcttcaaacatcctaaagttacgatataactagaaaaattggacttttctcattcttttgtctcaatcatcgtaaaaaatcagtttttgaataaaatcttcacacttttgttactttgtttcattcttatcttcaaagtttggatttttatgctaaaaaaaaggtttgaagtttccttattgtgttgtttatcttcatcatcgtaatgaatcatctttgtcaagttaccgagtcaaaaccttcacgcttttgttgttttgtttcattcataaagtttgagtttttgttttttttcataaagaatcatcatagtcacctttttgatattttgttgggtttgatgaaacaggagcaacaccaaaacttgttcttaagatgatggatgtgaagggacttaccatttcacatgtcaaaagccaccttcaggtaaatagtaattaattttaccaaaaacatcaattttgttttcttctttattcatatttcattcataacaccttgttttgattgttttgaacatatatataaacagatgtatagaggaggttcaaagctcactttggagaaaccaggtattatttttttccttataattatgaaatgaatcaatgatgatatttggaaaaagaatgggaccgttgattttaatttgaactgttaacatcaaacacataataatggatggaatttaattattttactgtatctgtttgtagtatgtactattggtctagtgtcatgattcataagacaaatgtcataaatacatttatatatttttcaagagtaatagaacagaaaataagagaatattcattaactagtttttattgtttcttacacagaagaaagctcatcatcttcaataagaagaagacaagacagtgaagaagattattatcttcatgacaacttgtctttacacacaaggaatgattgtcttttgggttttcactcttttcctctttcttcacattcttcatttaggtatttatttttatttataattgttttctgacaaagttttttaattttatttcagtaaaaaaaaaaaaaaagtgttttgcttttttgtttgtctgtatttgaattgtccttttactttggtgcagaggaggaggaggaggaagaacaaaagagcagcagacttcagagtctggtggttatgatgatgatgctgactttcttcacatcaagaagatgaacgatacgacgacgtttttgtcacatcatttccccaaggtataaataaatttctcttttgtcaaccggtttggaaatttaatgttgcaaaacaaaatcaagtccggttatgagttctaaccggtctgattgagactggtcaaatccaaagggattgagtccggtttaagtactacttgtcattgaatctaattagtttcatataaatggcatttaaccggttttagtccggtttggtaactaattttgtcttttggttcattagggaacagaggagtggcgggaacaagaacacgaagaagaagaagaagatttgtcgttgtctctgtcgttaaatcatcatcattggagaagcaatggatcatcggtggtgagcgaaacgagtgaagcagcagtctcgacttgttcagcaccattcgtatccaaagattgctttggttcttcaaagattgatcttaatctgtcaatttctctcctcggtagctaaataagttatgcaagatttaggttcagagaaactattcggatgtgtttttgaaactaggatattgaatgttagtagagaaacctagaaaatgaagtttagataaattatcaacgcagcgttttgatcgcctttgaacggaaaattaacaaacagagccaaacgcagtgttttgatctttgaaggataacccctaaacgcagcgtttctatatcaagatcctacggtttagaatgttcattgttattttggtcggcaatcctacggtagaaaaaataatctcgcagataaaacccattaaacgctgcgtttcatcgttggagggtaaactcattaaacgccgcgttttacattcaaaaaacttgaaactaccttataaccgcccagacgatgaccaacgtcgtcaacgtcggcgaagatgaatctatcgaaccgttttggctccaattccaagacggcgatactcaacgattcttactccgacgagaatcattcttcctccgccgccgccgccgtaacttccgtcgtaatcccaccgtgctccggcaatgtactccgagccgttctcttgctcttcttcatctgcttctgcttctccctctacagaacttctggttatctccgaatcgtctctgactcttcctccaccctctctcgcattttcccctctgtcaacgattcttcttcgtctccgtctccatctccgtctctgtctccggtgagtattcttcttcttccacattgtttctatatatttggtgtttattcataaatccgatcttcgacttcattagacttcgattctagggatttgatttggtaatcgaaattgaaattggttcgattttgattctgattctggttttggtttcttaggaggaaattgaggaacctaagctagaagaagtattgcgtagagcagcaactaaagatggtacagtgattttgacaactttgaatgaagcttgggcggctccaggatctgtgattgatcttttctttgagagttttagaattggtaaaggaacaagaaggctattgaaacacttggtgatcattgctttggatgctaaagcttattcacgttgtcaagaactgcataagcattgcttcagacttgaaacagaaggtgttgatttctctggtggtgaagcttatttcatgactccttcttacttgacaatgatgtggagacgaatctctttccttcgctctgttcttgaaaagggttacaactttgttttcacggtataagtctctctttcactcttgaaaagaacttgttggttggttgttctattgagtgatctattgtctttgttctctaggatgctgatgtgatgtggttcaggaacccttttcgacggttttacgaagacggtgatttccagattgcttgtgaccattacataggaaggccgaatgattttaggaatagaccaaatggaggatttacctttgtgagagccaataaccgaagtataggcttctacaagttctggtatgattcaaggaccaagtaccccaaaaaccacgaccaggatgttctaaacttcatcaagacagatcctttcctttggaaactaaggattaggattaggttcttgaacacagtgtattttggtggattctgtgaaccaagcaaagatttgaatcttgtttgtacaatgcatgcgaattgctgctttggtttggatagtaagcttcatgatcttagaatcatgcttcaagactggagagatttcaagtctttaccacttcatagtaaccaatcctctggtttcacctggagcgtcccacagaattgcaggttcttgttttgtcatttttattatctttgagattgttagagaggatcaatgacgtttttgtttttgcagtcttgattcacttaggcctgttgattctaaggatgaagaagagagtgaaccaccaggagaatctacacagtgaagtgtgtggtgttaacattgtatatagagaaactggtttgagattttttttcacacgaagaaatagaaatatagaagattaaaactgtagaatcatcaatcattcttaaagagatatacataacactaatgactagttctctcacttagtacaatgttcttgttgtagttcatgaatggtgtctgacctcatacgcctcacacttgactcgattcaattctaatatcacttagttattatgcatgggttaatctagttcacgggcctccattcacccattctttttatgtgggcctagtctcgtcgcggcaatcaatacattattctaaagtggtcgtaaatgttgtgatttgttatgcatatcgcataccacaaaaaaaaaggtatgttcttttgataaatatgatactgatagttacttactaatcctacgatattatttgggaagtacattttaaatgtaaccttaatttttgtaagtaattatataggtatgccattagaaataaaattttaaagagtaaattaatttatctctttaaggattaaaaagtcaaatactaatttaattaattaaatttaattaaaaaacgaaatatattattaatttccaaaaataataaccaatcaaaatcaacatataagatttgatatctaaattttaattaatttaatttaattagaaaaacaaaatacattattaatttccaaaaaagtaaccagttaaaatcaataaattatgtttgatatctaaattatcatattaattttttattaattattatagttcacttctcatctttatatgattctatttttgcggaaaaataatatcatcattataaaaaaataattagagttttttcgcatatgccataatttgaatttttaaaaacaaatataaactgttccatacatgaaaaaatattataacggtgaaaaaaaaatttaagaaaactttctactgagtaacgggtcataatttgaaaaatttatattcaatttcatacatattatattgaaaatttataatttatatatactacaaataattaataacatattagatgtgattcaatttttaatacaaactggaaaatcctagaattgacgggtttagatcgatattaatacaagatggtatactacaggtgaaactcttaaattaacaatcaaactacaagcgtataatcttaaacactaaacaatatagataatatcaacaaaacatatacaactcacagtttactatacatttaaaatcaaataaaataatatcatatattttttaatcatctttacaataaaagtttttagtttaactaaaatataagcctacatgcggtatactgcaggttaatatttagattatagagcttatttgatctaaagacgggtcatcaaagatttcctaaactgaagcaaaatatactaaatattcaaatatctacatgttaccaaattataaacaaataagtcaatttaatattttatatacgaaatcaattaaatcttaatcacataaaaattagcacaaaaaaaaagtattcaacaattaaaattttatcaaatctctgtgttatataagttttaatactatattccaataaagtgtaatataccttttcaatttgtattctttaactaatttaagctaactaatatatttgctaatcttatatctatcaaaaccgactatcttttcttagctctatattatttttgcaagatttttttggtggatttggataaaagtgcattcgggtcatatggtacattcccttattaaataaatatggtgcactcttatgttattagctaaaatgtttagattataattcagagttatattattaataaaattaatattaataaaataaatagttttttggcaagacggatttggagggacgggtttttgaatcaacattaataaaaaagtaaaatataattaatccaccgtttcaatacgggttaaatctttaatttattattttttaagaccactaatattaaacatatcaaatcatcctaatttagaaaagattatataaaaccaaaaatgttatgtggtatgtataatgttactatatataaaattaaactataaaatataaatgtattagagaatgatacaatttgcaaaacttttatatatgaaaaataattcttaaattttaaaaattactactttaaaaaaaaatcacgggacgggtaaagaaattacagaacgtgttttattttggaattgggttatatggtggatgtatttgaatcaatatttataaaattttaaaatattattaatatgttgttttaataggggttaaaaacttcagttttttaacaattgtctcatgaattcgtggtatagtgttagttaataacaattataaactgtaaactataaatattttataaaaataaaatttgcaagttttaatatatattacttttaaaaaataaatcgttccgcggtataccgcggattaaaatctagtgaccatttattcataaagtttttcacttcaaacactctaaaatatagaatttttaatgatataataaattgtcaatttttaagcatcttttcatgatattgttgttaaaatcaatcacttcaaaaattcaaatacgtttcaaaaattcaaaaaatcgaaaatttttatatgtttattactctttactaaattcaaaaatatatgcaccatcttttaatatttcatgatatatattttatttttaatgatatcaatcacttcaaaaattctgcaattatttgctttagttaaactaataaatatactatttttaaaatattttagtattcaaacaaatgttagttatacttaaaataaatataagagatttataaaatctcaatgacttacacacaaacaaattcataactgtatttcagatagctataaaagatttataacctcgccatgacatacacgtagactaatatttattagtcaataaaaaaattcaacagtcattatggagaaattttttaaaagtaacttataattgacaaatattgattttttattattttatttttaaaattccttagttttttaatttgagtcattttacaaccaccacttttaaaaataaataagaaacccctatgcttattaaaatttatgtagtctagtactcttatttgtttaaaaatatatatatacaattagcatcaaaaacaattggaaaattatagtaaaaattattggtttaaagtggttaataaaaattttgatatcttatggatatattatctaatcatttgattgacctatatatgattgcatttgatatcttactacattggctatatatcttttcaaaatttgctaaaatctattaggaaaattgtcattggaactgatatttacatggtgtatatatgaaatggttgatttgttaacaagccaaaattaagagttagatttaaaaagtaaacgaattgattggaccaaattaagggacttattctgtgattttttttcattttcttttgttctcacacttggaggttaaactggtaaatactaaaataactaattattttattattattttaaagtaatttaatttataaatggtaattaagtctaacaccttttgtccagttatacaattagtcaataatttactttctttgaaagtaattaattaaagtagttaatgattttgcaaaactgcctaaataacacctaaatttattcttaacccatctatgtatatgtttactatgtatgtatatatatttatatatatatatatatatatatatatggccctctacttcatacttagaagcaagaagctcatagaaatttacttcaaaaattgacctcaaacgacaagctaaaagaggtgaagttctttttcctatcttttattttaaatatggctctgtttatatatctatatttatatattacttactgttgatttgaaagaaattttctattcgaatatgtatgtgagaggaaaggatatggttcaagtgtcattgttatcgggaatggcaaattatattcctttcctcaaaaaatttagcataacaaaactaattatccatcatataaaaacaatcacatcgtatttgttttctattgtcttatgctaaacaagttttatatataactcatgctcacgttaacgaagacccatacaaaaatgggttgattttcttgatctccttcattggagaacatgactgattttcaatagtcactaaagtatatacatagatatatactatatagttgtttttgatattttaaatggataaaaaaaaagatgacgggatctatcatttgggaaattattcatagatttatttaaatagttcctaactaattgcttgaatatgggaagagacgacgaaatatagttaaaaaattggagtatcctttttggtttttactttaccatatacatgaaaaatatatacaatcattcttctttttgtcttcttttatctttggaatatttcttttcacattcaatcttccatgacacacagacagacatatatatatgtgtgtatgtatgatatgataggaactttttaaaaccaaaaaagagagacccatatgagatgatgatgacgattgagacaaataattattttgacaatttaagaaaaacataagatgctttgtggattaacttttgaaaattcaagaaatctgtccctatatatatgaaaacattagctttagaatacaattttatgagatttatttagtttatagtttatagttttaaatttatatttatgtgttattaaaattgtaaaattatatgaaaacatagtcgcttagttttacaaccgctaatttatttcaaactcaaaatattatatttttattccttcttcggttacgtatttttcttatgagatattatatggtcaaacatttaaaattagttaaatgttacatacacacaaattccaacattttcatttctttttaaggaaaaaaccatttcatttctttaagatatataaaaccaaaaaaattatgtttttatatagcttagatcgtgatgctaaacttttcttgtaagagcaatctcgtatagatattttatgttagtgtcaaatatcttcttctacaatttctaaagtcatattacactatggtaattgttttctaaacccttttagatccaaaaaaaaaaaaacttgaaatttattattcacatatgttagcgagagagaggagctgttgagggttgtctcacgcaccatccactgtcgttttgtggcaaatggattgggtccaccgacctctgtagctctcatagtttcttttttttctaaaattaattacatatttagaaaaaatgatatcaaaaataattaatagctctgtatatgtgttagtgtctacaggcgacaccaaaattatataaatattcttatttaaatgcgttacaaacaaaagaaaaattatataaaattttacaaataaatgtatagagtttttagtatcatatgtatcatacatatgaaattagagctataccaaactaaccaagctagatttaaattcagtttgattatcttaccctatttttttaaccgaatatgaacttttaacactctaggctataacattgggtggtgacttatatttcttctttctttttactagcctacactctttttcacctgtcactttcaacttctctcttctattacctcacaagaatttctatgtttttttaataattttatatctatttaaaaaaagtataaccaattaattaaaaatctggaatatcccaattttagggctttattgagataagatatcagtggaagtcaaaaaag

SEQ ID NO: 153 - DNA, 93212 bp, Arabidopsis thaliana
gaattcaccgagtttgaatctgcttaacttgaggaacaattctttatcgggtcgtttgatgttgaattgtacggcgatgattgctttgaactctcttgatttaggtaccaatagattcaatgggaggttacctgagaatctaccggattgcaagcggttaaagaacgttaacctcgcgaggaacaccttccatggacaagtaccagagagtttcaagaacttcgagagcttatcttacttctcgttatcgaattcgagtttggctaatatctcttcagcgcttgggatacttcagcattgcaagaacttgacgactttggttcttacattgaatttccatggagaggctttacccgatgattcaagtcttcatttcgagaagcttaaggtgcttgtagtggcgaattgtaggcttactggttcgatgccgaggtggttaagctcgagtaatgaacttcagttgttggatctttcttggaaccgtttaaccggcgctatcccgagctggattggtgacttcaaggctctgttctacttggatttatctaacaactcgtttacaggagagatccctaagagcttaactaagttagagagtctcactagccgtaatatctcagtcaatgagccatctcctgatttcccgttctttatgaaaagaaacgagagcgcgagagcgttgcaatacaatcagattttcgggttcccgccaacgattgagcttggtcataacaatctctctggacctatttgggaggagtttggtaatctgaagaagcttcatgtgtttgatttgaaatggaatgcattatctggatcaatacctagctcgctttctggtatgacgagcttggaagctcttgatctctctaataaccgtctttcgggttcgatcccggtttctctgcaacagctctcgtttctgtcgaagttcagtgttgcttataacaatctctcgggagtaataccttccggtggtcagtttcagacgtttccaaactcgagctttgagagtaaccatctctgcggggaacacagattcccctgttctgaaggtactgagagtgcattgatcaaacggtcaagaagaagcagaggaggtgacattggaatggcgattgggatagcgtttggttcggtttttcttttgactcttctctcgttgattgtgttgcgtgctcgtagacggtcaggagaagttgatccggagatagaagaatccgagagcatgaatcgtaaagaactcggagagattggatctaagcttgtggttttgtttcagagcaatgataaagagctctcttatgatgaccttttggactcaacaaatagttttgatcaagctaacatcattggctgtggcgggtttggtatggtttacaaagcaacgttaccagacggtaagaaagttgcgatcaagaagttatccggtgattgcggtcaaatcgaaagagaattcgaagcagaagttgaaacactctcaagagcacagcatccaaatcttgttcttctccgaggattctgtttctacaaaaacgaccggcttttaatctactcgtatatggaaaacggaagcttagactattggctacacgagcgtaacgacggtccagcgttgttgaagtggaaaacacgtcttagaatcgctcaaggtgctgcaaaagggttactttacttgcatgaagggtgtgatcctcatatcttacaccgcgatattaaatcgagtaatattcttctcgacgagaatttcaactctcatttagcggatttcggactcgcaaggctgatgagtccttacgagacgcatgtaagtactgatttggttggaactttaggttacattcctccggaatacgggcaagcttcggttgctacttacaaaggcgatgtgtatagtttcggagttgtgcttctcgagcttttaaccgataaaagaccggtggatatgtgtaaaccgaaagggtgtagggatctgatctcgtgggtcgtcaagatgaagcatgagagtcgagcaagcgaggttttcgatccgttaatatacagtaaagagaatgataaagagatgtttcgggttctcgagattgcttgtttatgtttaagcgaaaacccgaaacagaggccaacgactcaacagttagtctcttggcttgatgatgtctagaagaaagaggaacaatatcagagacactatgatacattttgtagggagtgattttcatacttttgagatacaatgtaaatagttttcagataataatttgtttcttcgttttcttcttccattttttttatctcagtttatgattcagattcagacattaaagatactagacagaacatatactgtctcagaaaaatgaaaaatctttttgtagtgtttcagaaataatgagttcttgaaaaaacatgtctcaagcaatttaaatgagcaacatagattaataatttgtgttacatctttattctgtgatttgctttgtggatactctgttgattatgttataccttttagagatttttggtttaattaaaaaatatatatatttggtagctaaattccttttggtcttcaacaaaagaattccttttggccaactatagtcaattttttgttaagaatccattacattaacttattttttatgggtgtgaaaatattgttcaactcatttgaccaaaagaattcaaagattatgactttgtaaggtcaaaatataatatttgcttcattagaaaggttttctatatatcgatttctcagtccccaaagaccacaaatttatagattagtacgcttcctataatggttccttaaaaattttcaaagattgactacagattcgatagtgaagatgttcacttctggcttttcttccacactacatgaaaacagccaaaaatataacaaataaaatacaaggaaaaagaaaaagagcattaaaagtttaaaacttatgtatgatgataaatataaaaaaaaatatcgaaaaatgcataaacttttaaatttgagacaaaaaagcatgaacttttcaaaatgtcatttaaatcatacggtttagtttgactttttgcaaaaaaagtgaagttttatcaactttgccattttcggcaagtcgttaaatttccgttaacggggataactttcctttacaattctccgttaaattaaaacgattttgttttggagtttaccaaacaacgtagttttaatagaaaataaatggaaaatgcttcctaggataatcgtactgttggccttttgtactcataagagataccccatcgctgagatatgtcaacaatttaatatattacaaacaatatatatatatatatatatactaaaaaataacaatatacaactaataaaaaatacaataaattaaaaataataaaattacaaatatatactattaaatatatttaccataatatagattttgaaatttcagatatttaatttaataaataaagtttttttttatatttggaaattattctttcctaaattatagaagaaaaaatggccaagtcaaagaaacttaaccattttagcaaaaaattaaactaaactttgtgatttaaataatattttacactttttttttgttctaaatttgaaagtttacacatttttttacgtttcccccttagagtattggtacatgagcatctttgtcttaagggagatttgcaaaactgccattattctaataaccttttgtaaaagtgccctttcctgaagtccatttttaaaactaccccttctaatatgccaaatgactgtcttaccctctgaatgattaggtttcacgttggtttcacaaacttcttcggcacaaacttcttcgttttcctctccgattttcatctccgatttcactcaatctcgccggcgaatttcctctccgatttcactcaaaatcgccgacgaattccctctccgatttcactcaaaatcgccaacgaatttcctctccgatttcactcaaaatcgccgacgaattttctttctgagaaaccccaaaatcgccgatgaatttcctctccgataaacctgttcttcgctgaaggattcagatcatttctctacgacgcaaacaatccccagagatatcgatagatccgccggtaaccgtttttataatcgattttatagtcaattttatagtagatctgacgctgtttcataacatgttttgcagatggattcagagagcgaaatccttatattgcctgaacaaatctacaaagaaggtgaggaatctattgcactgggaaccgttcaacaatactcggattggaatttagttagtaaagtagaggaagctttaggcgagtgttaatttcagaagattagaagttcgtttcttggtcctctagttgaattgggactaaaaatgaaggctaagaagggaattagattttctggaaaaatctttcactatctcatgcagcagagagtgaaaacaaaaggatcaactctttggtttagagttgattctcaacctatccgtttctccttgagagagttctatctcacaacaggtaataaagttttacaatcgtttttaaagcttaattaactgtcgtagaatgatttacaaggcatttgcataactgtttgcgtagtttacaatcgtttttaaaacataagtaagtgtcatagataatttacaagggattttaaaagcttttaaaaggggtttacttcattaacaatcgtttaagaagcataagttagtggcagataatgatttacacgggattttaaaaaaggtatgcatggtttacaaccgtttttaggcataagtaactagcatagaataatttacaagggattttaaaagcttaaagaagtgttaaacacgtttacaagggattttaaaagcataagtaagtgtcttaaaacgatttacaagggattttagaagtgtttgcatagtttacaatcgattttaaaaacataagtaagtggcatagaatatttacaagggattttaaaatcttttctaagggttaaacatgattagcaatcgttttttaagcataagtaagttgaatagaattatttacaagagattttaaaagcttttagaagggttaaatatgatttacaatcgtttttaaagcataagtaagtgtcatataatgatttacaagggattttaaaagtgtctgcatggtttacaatcgtttttaaaaccataagttagtggcattgaatgatttataagggattttaaaagcttttaaaagtgttaaacatgatttacaatcgtttttaaagtatttactataaaacctgtaataatagtctctacactgtcttttgttcatacaggaattcaatgtgaacctgttcatagggaacttcgacgaaaggggaaagatcctgtaaaagaaccatacttttgggctagtaaaggatcctatactcttggtgatctcgaagatcgattgtttttaaaacctaaggaaggtgaacctgctgttgaagatgaagaaaagttgtgtcttgctgcagtagtgttgactgaaggaattcttttgacaccatatggaaaagagaagatacctttgccaagattgcaacatgcttctgattttgagatgtacacagcccaaccgtggggtaaagaagcattcagtgttctatcaaattcaattctgagaatggacgagaaaacttgggcaaaagagaaatatgatttgagaggatttggactagcgctaacaatatgggtgttgagcgcagttccagcatttggtgcagcatatggagttaaagataaggaattccaatctgaatatccattgatattgaagtgaaaaagcactactactccagagtttttcaagatcgtaaaccttgtaaatgatgtttctgaggtaagcttttgtctatttacagaattctttaaatggtttttagatttgaagttctgctttctcaaaatttgtaatgttattgtatcttcgcagatggaggtgaatacaattattggaaacccagaagacttcaagtctttagttcctgatttccacacagacgacacagaattccaacatattttgggacttgttaatatgggctacagattgaagaaaactgaatggaatacaagatgcgttgatgtttgtgctgcccttgaagaagtaggtcaaaacaaaatcaataacaaaatatctgatagcgagaagcttgacaggattttgacaatccttgaagatcttaacaagagagtcgagctgattgagaggattttggacattagaatggaggaaaagaataattagagatctgaggaagatgaagaaagaaaacaagaagatgaaggagtagaaagacaaccagaggtaattgtaaatgtttctttaaaagctatttgaaaggaaaggttttacaatgtattttaaaggttaaatacgtagtaaacctttacaatatactcttttttttcgcaggctgaagaagaaggaggactagaaagaaaagcagaggtaattgaaaatctttacaagctattttaaaggtatactaattatattaatgattgacttattgtttttattttgttgcagaatgacaatgaatcatttgaagattcaatccgagagccaaacacacagtatgggagctatccgggtgatgatgaaaacacccaacgtgatgttggtgatgaagtagctgaagaatcatcaaaagtacagtaatttatatctctaaaagtcttacaaaaattattagtatcttttttatatttttacattctgttatcttttcaaggataagtctcctactccacgatcctctacaccaaatttcaatattttgtctgaagaaagtctggatgttcaaaaggataagaagagagttagcagaggaagaaatgaggttagcatttaaaaaaatttgtattatctaaccaagtgtttataaattttttttcaaatctttaaaagtttatctttcatgcaacttcagaacaagagagttaaagcaagtgttcatgctgaggataatcttaaaacaagaaaacaggttagtatttgcaacagtactgtttttaaaatttgtcaattgtcttgttatgatatttacaacggattttaagagtacttttaattggtgttttttactattctaagtgccgagaaagaggcagaaacaagttgatagtgctgatgttgatgttccaacaaggaaagaggttagtatctaatttattatgattttgaaaattttgtttacaaggtattttaaacatctattttttttattatttttgataggcacagagtaagaaaaggaaaattattggcaatgatggtgataacgctgataatgatggcgacaatgatgattttcagcccgctccgcaaagaaagagtaagtggggtacggttccttccattcatacccaagcacctttcacagctgagaagaagaaacatccaattttgcatccatttgcgaaagttgatggcacaagacttgagaaattggctgaatggaagaagtcaaggaaaaacaagtgagttttgttagtaagatagtgagttttttttaataatggaacaagcatcattgttgactgttttgttgttgtaggccactatcaatcgcgggaaataatgtagatacaaagtggtttacaaccctagagacgccagggaaagcaatcacagcaacgatatgtctaaaaatccttgtaaaattggtaacccatgaattacatatagtttttaaagcatcattaagttatttacaaaagggattttaaaaagggttacgtggtttataaacaatttttaaagattagaaagtggtaaagaatgatttacaaggtattttaaaaaggatttacatgacttgcaatcgtttttaacggattagaaagtggtaaggattgatttacaagggattttaaaagctattaaaaagggtttaattgattaacaatcgttttagaagcagaacttagtggcatagaatgatttacaagggattttaaaagcttttaaaagtgtttaacttgatttacaatcgttaaaaagcataagtatgtggcgtagaatgatttacaaggtattttaaaaagggtttgcattttttacaatcgtttttaaaggggttttctaatatgataatttttatttttgttgtgtttagcatgttgatgcagctttggagttgatgaaaacgaggaaggaaagcaatccagaattattcaaaaacaaatcagttgtatttgttggatcgtctttcttaaatgtgattgatgagtcatacatgaagtttttggataacaaagagggatttcagtttcagtctgaagaaatcagtaagctgataatagaggaagaaaccaagtgcatattggctcctttctgtatcaaaggaaaatgctgggttgccttgctcatccacttggaacagaagacagtttgtatatgggaatgtgcagcttcttatttaacagaagaagtcaagaaaaaatatgttactgcctactctatagctatgccatacattgttcggaacatcctcaaaaaagaagacatggatgtctctccatttagcatcaaagtcctgaccacttttcctcacgtaacttctttaaatatatcatagtcttagaaatgaatattccgtaagtcctgacttctataacttctttgcttaagtaattcttttggtttttggttgtaggctcctagaaatgaagagtctggtatctatatgctgaagtttatggaatgctactcaatgtataccagccattcaaaccttgaagggaacataattcaaaacgttaggaataaattggctgctgacatcttcaccgaattagggtcagtcactttgtagaagtagcagacttctaatcaaaaagtagtggagtataagatagatttatcagcttttgtttcttatttcataaaactttgtcatttgaatattttatgaacatctgtatggaacaagatttatgaagtttatttagttcaactcctgttttacaaaattactgtataatggttgtttgggttaacaggtgctttgatttgaatagaaaacgactttaaacatgcttttaaacagggtttttaaaaacatgcttttaaacagggtttttaaacacgatttacaagctgctttataaggattttaaaagtgttgaaaaagctgcaatagcggttattatgaaaaaaaattacaatcgtttttaaaataatttacaaccgtttttaaaagggagaaaatgtcaaataattgccgaactttcaaaaagtggccgtttaatacgtcaacttcgtctaaggccatattaaacatcaacttatcgttgaccaaacttttaaaacatggaatatcgttgaccaggcccattaagacatctcgtaaactctgttaacagacccactaacagacgtttagatccgttaatacttctctgttagtggcgaaacgaccacgttttggtcctaatcgaaaatcccatatctgataaatccccaaaatcgaacttgaaatccctaaacttgaaattcaattccaattcccagattttgtttattcttcttcttctacattgtttatacgggattggagcttcaaatcttcttatcttcggaattctccatcctgagctcaagaaatgagttcaaattccgcgaattcgaattcgagtattgaagacggaggtcgttggggacgtgggttaccttccaagtgtatttgttggttagacgtcgttgtctacacatcgggttcacagacaaaccctggaagacccttcttccgctgtccaacgaagaaagatgtaagtttaattgattttgtgttttgaatttggtttggttgataatttgttttggattgaaatgtaggatcatctgtttaaatgggtcgaaaatggtgtgtacgaagaggttgttgatgctttaccgaagttgtccaacattgacaatgagattaacattgccaaatctgaagttgcagccgaaattgatgagttataggctatgatcgtagtactgaaggaagaaggaatgtggagctcaagggaaatcaagaaatgcaaattgatgatcaaagtgtgtttggtgagtcttggtttgattgtcattgtctttggtttcataatgttcggtaaaaccaaaaatcagaaacttgttctaggttactagtggtgttggtatccaaatgtttttttttctatctttgatgttgttgtctacatggtactttattaatcaaaatgctgttcatgttattgtcttgatggctctttattaatcaaaatgttgttttatgttgttgtcttgaaagacaaatttttagtgcaaatcaaaaaatgtcatacaagaggcaaacatgtcatgctctttatcaaagtcaaagctgaaacaagcttaagttgatacaaccaaaaaagccgtgataatgccttagttttgacaccaaaaaaaacgatagtgttaacaacattaagaggaacactcaagccgtgataatgccttagttttgacaccaaaaaaaacgatagtgttaacaacattaagaggaacactcaagccgtgataatgccttagttttgacacaaaaaaaacccgatagtgttaacaacattaagaagaacactcaaaccatgatgctaatccagcaagtccttgtggttgtgctgggttgcctaaacccgatagtgttcaatcatcgtttttaaaatgatttacaaccgtttttaaaagagatttacaaacgatttataagctgttttaaaagcgttttaaaagtgttgaaaaagctgtagtaactgttattatgaaaagatttacaaccatttttaaaatgatttacaaccgtttttaaaagagaatatcaaccgttgaaaaagttacagtaatgttaaacactgtatctgttactaattgggcctaggcctgttatttagaaaaacaaactgttttagtaaaaaaacactaaaagcccaaaaaacactaaagcccaaaaattcactataacccaaaaacaaaaaaggaagggaaccgtgaaaagacaacaaaaaagtaaccaaaaaaaaaaaaaaaaaaagaataaatgtcgtcttcgtcttcttcctttcaacaatctgaagaaaatctgattatccagcaaaaaggaagcaattgaaggtaactaatttacgaaactgaagtttaacatttgggtttgtttgatttttgccgaatctcttttttgttctagcatttctaggtttttcggttgaaaacgaaacaagtaaaataaattgatatttgggattttgagggagtgttgaaaattgttatataattttgacagatttatgttttaaagtttgatatttgggtttcaaaaaccttcaaagaagatttcaaatgccgattaacttctctgttgtagcaatttcaaagttttttcgttttgaaactttaacagtaaatagattgatgtttgggtttgtattttaatttatagatcctcacttaatatatgggttaccagttgattggagttggtttggaaaagggctttttgtttctattttcagcggttgtgttctttgaaaatgattaaaattttgtttttggaatggtttcaaaacggtctttaaaaaggattatggggtaatgactgtgttttacaagggtttttaaagtcttaaaacgacttctaatgactttgaaaaatggttttacaagggtttttaaagttctttaaacgacttgtaatgactatgtttatgtttcgaaaacaacaaatgcataatagatttacaaaaatggtttttaaaaccatttcaaaaaactgtgttaatttaatgactgtgttaatgtatttaatcaggttttgagaaatatgagtacaaagaaactgttcttccctaaaagactgttccaaccaggcagcgaagtagataatattacaagggtatcaaagcattcatccttcaaaattgtctcgactgtcaggaaagctttagagccgatagagttcaacacattaatggacacattcttgggtcctatagtggaattcgctgaaatgaacttagcattttcaagccatatcgttcatcatttactccagagaagaatactaaccaacaatgacgaattgtggtttgtatttgctgatcaacctatgcgattctccctgagagagtttatcataacaacaggacttccaatggatgatgcatcaggaagcagtccaaatgtgaagagaaaagaagaaagaaaagcggtggataaaagataatcagactttgaagggaaagcagaaaaaagatgtgtggattaacaaggaaatgacttttttagatcttacatatgttttggaaaagcgttccaaaaaaatgcagccagaggagagactgagattggcgggttcgttactagtggagggcatattgctagctcgaaattcgactaccatgctgccaattgagaatctgaagagagctactgatttcgaaaagttctgtaagtatccatgggtgcagattgtgtactcatatttggtaactgaagtgaagagaatcggtaatgactatttgttaaggaaacaatatggtctatttggatttgttcaatcaattcagatatgggcattatcatcggttcagaagttgggagaaaagtttggcactagagatgaatcatctagtggaaatattccattaattctccaatggagatcaacatcgtctccaagtgcaaaagctataacaatgatagcagatggtgacaaggtacattttcttagttatggttttttttttatgttttaaacactgtttataaataaagagtatgttttacaatagtttttacaatcaagttttaaagatttacaaagggttaaaagcaatttaaactatttacaacggattttaaaaggttaattaagaattgtgcattatttttacacagtttggaattttgtttatctttgcaggttgaagtgacaccaatagttggtgttcataatcatgaatacgagcacttggtttcacagaagaatcctgaagacaaggatctgttggatgtttttgatcttgtgatcaaaggataaagaatgagcaagaaggattggtgtcagggatggattcaagtggaacaaggacatcaaggaagaattgatcatgtcttgaaacctgcaattgaaacagttgtgcattaaagcagaaaaaggaaatcaatgtcctttggtgagaaggtaaaactggtatatgaaaattgtgaggttcttaagaagaaagttggaaggctggagggctatttaggcatcgaaagagttcctgccagttatactagagaagaacaaaaagaagaggacgaaaaaaaggagcaggaagaagaaaagcaagaggaagaaggaaaagaagagaaattagaaaaggtatgtgtttttacaagggattttaaaagcttatagatcgtgttttaaagatttttagccgtttttaaaagataggccgtgttagatatgtatttacaagggattttaaagacatcttaatggggttttaaagatttaaattcgttttaaaggataggcagtgttcgataagtatttacaacggattttaaaagctttttaaaaagtgatttacatgagtaacttgtagttataaaacttgtaattttatatacagattgaatacagaggcgacgaagggacagaaaaacaagaaatccccaaacaaggcgatgaagaaatggaaggggaagaagaaaagcaagaggaagaaggaaaagaagaggaagaagaaaaggtatgtgtttttacaagggattttaaagacttcttaatggggttttaaaagattgaaattcgtttttaagtgataggcagtgttcgataagattttacaacggattttaaaagctctttataagtgatttacatgagtaacttgtagttataaaacttgtaattttatatacaggttgaatacagaggcgacgaagggacagaaaaacaagaaatccccaaacaaggcgatgaagaaatggaaggggaagaagaaaagcaaaaggaagaaggaaaagaagaggaagaagaaaaggtatgtgtttttacaagggattttaaaagcttataaatcgtgttttaaagatttttagccgttttaaaaagataagcagtgttagatatgtatttacaaggggttttaaagacttcttattggggttttaaaagattgaaattcgtttttaaagggtagacagtgctcgataagattttacaacggattttaaaagcttttttaaagtgatttaaatgactaataagtgtgtcctggcttgtatttgggaacttgtaattatttatacaggttgaatacagagatcatcattctacttgcaatgttgaagaaacagaaaaacaagagaatcccaaacaaggcgatgaagaaatggaaagagaagaaggaaaagaagaaaaagtagaagaacatgatgaatataatgatgctgcagatcaagaagcgtatataaatttgtcagatgatgaagataatgctactgcacccacagagaaagaatcacaaaaaaaaaagaagaaacaaatgtctgctttccttaactttttaaaaagacatgataaaattgtcaaaaaataaaaactttgttttgatgttttggtttacaggttttaaaagaagaaaacgtagaagaacatgatgaacatgatgagactgaagatcaagaagcatatgtaattttgtcagatgatgaagataatgggactgcacccacagagaaagaatcagaatctcaaaaagaagaaacaacagaggtctgcattccttaattgtttaaaaagacatgataaaattgtcaaaaaataaaaatttgttttgatgttttggtttacaggttgcaaaagaagaaaacgtagaagaacatgatgaacatgatgagactgaagatcaagaagcatatgtaattttgtcagatgatgaagataatgggactgcacccacagagaaagaatcacaacctcaaaaagaagaaataaaagaggtctgcattccttaattgtttaaaaagacatgataaaattgtcaaaaaataaaaatttgttttgatgtttttgttacaggttccaagagagaccaagaaagatgatgaagatgttaatcaaacaccactctctacgcaagaagaagaaatcacccagggacagagcagtcgtaagttctttttacattcacagatgatttgccttgataaacaacttctaaatatttttgtttttgtttttgtatcagttcaaactcctttgacgccgatcatgttgagtcatgaagtaatggaagaaattgacctaaaagttaaaaaatgggcgaaaaacaaattaataagagatctactatcgtcacttgaagaagtaagttaaattacatcattgttttgctgcaaaagattttaattctaatcattttggaatttttacatttcagattctttggtccgacagtaaatggcaaaaagtcgaaatttggaaaatgtgggacgagaagaaatacaaattagcattaaagaaagcaacgttactcattcatcctgacaaactgcctcgagctcatccagaagtgaaatacctagctgaacaaatctgcaagataataatggttagtgttaaactcttcttttgtataacgatatatctttaaaaacttgaatattattgttatgcaaaaaataacttacaggttgaattttatttgcaggtagagaaggacagagctactaaggcaaaaatggatttagttttttatactgacttatttcaaacatgtttattttacttttgttatttggaatctatgattgtacttgtattttaattatgactgtcaaatctaatcaaaatgctttactattgtcaactgtttatggttttataagaattgtcatgatttacaagtgattttaaaggcataaacagcttacatggtttgctatcggtttttaaggataataaagtggtaaaacatgatttacaagggattttaaaagcttttaaaaggggtttacttgattaacaatcgtttaagaagaataagttaatgtcagaaaatgatttataagggattttaaaagcttgtaaaagtgtttaacttgattcacaattgttaaaagtatatgtaagtggcataacgaaatatttacaaggtattttaaaaggattttcaaagacgttttaaacaggcttttacaaaatatgttaaaaaggtaaattattggaattactattaaaattacttgtaaagtttgatagtaattttagtaaacgacttacaagacattttaaaagattcaagttaaaagcttgtaaaagtgtttaacttgatttacaatcgtttaaagtatatctaagtggcataacgaaagatttacaaggtattttaaaaggatttaaacagacgttttaaacaggattttacaagagattttaaaaggtaaaatattggaataaccttcaaaattatttgtaaaagtttgatagtaattttaacaaacgagagtaatgacacgacacaatgaagaaaatattaaaaacccaacaatattcaattctttggagataaagatatatctaaattgcagcaacacaagttgatttgttgtgacccgactgaccacacctactgcatttgtgtaattttggttttggctgagaccgtccatgctcccaaacagaaggtatcctctttttcttccggatgctcggtcagacacaaaaactaaatcattctcatcagggattatattcagcaaacacttcaaaaaccagtcccatgacgcgtcattttcagagtcaactattgcaaaagcaataggatacaaattaaaattcccatcctgagctgaggcaccaagcaaagtccctttaaactttgatgtcagatgggcaccatcaatagatatgacttttctcatcaacttataacctctaattgatgcaccaaaagccagaaacgcatacttaaacttattagcagaatcttttttgaaaaaagtgatagaacctggattcgtcacttgtaccctgtggaaccacctcggtaaaacctcaaaactatcatcaggtaaacccctcgcaagttctgctgcatgttcttgaactctccaagccttcgaataattgattccaactccatgatcttttctaaatatttctatcagctgcttaggtctgaggggaagctttcctccttcaaaatggttacttatcaatcttcctaatgtccttgcgaatgcttgacgatgactaacattctttaatgaagagtcacaattgtgatgactaacatacttccgaataacataactctcggatccaccagccctagttgcacgtagtctccaactacagttttcatcaatacaatgaagaacatacctcgtgagatctgatttcactgtatgaaactcaaagctgtgcttcactgcaaacatccgcaacgtgaataccatctcatctttgtctttgaaaaattttccaataaacaaagaatcagcatcacttagaccagttggaaacgcagaactagaatactgttgatcaagaatactagatgtttcagatacacatgcctcaataatcctagaggttaacctcggctgccaaaataaaaagcttacctcaaacatcaatctatcttaaataatgattttacaaggatttttaaaaggggtttaaaaacgttaataatgattttacaagattttttaaaaggattattacctgagtagtagatgcagaatgagaagcaaaaggatttgaagtcgtctcagcctgtaataaactcaatcactgacttaataatttgattttacaaggatttttaaaaggggttttaaaacgttaataatgattttacaaggatttttaaaacgattagtacctgagcattagggacagaatgagaaacaaaaggatttgaagtagtctcagcctgtaataagcacaatcactgacttaataatgattttacaaggattttttaaattataacacaagaaggttattgaaaaacctgctcaactgtcacagaaatttgctctacagtcaaacataactgaagcaatcctccactctgtgagaatttgtgcataaaagttgcaagctgtctatcgttcctaatataaagaggatgagattgtatggttgtagacgtggagactaacttgtaactaagcttcaaagaattggttgaactatctatttgaaaatcctctacaagaatatcaaacaacgcgtgataggtaatgtgctcatcaatgagcactaaagaagctcccaaatcaatgtctaattcaaattcccaagtcatattgtttgtcaacttccacaagccacaaacagaatacaattctagcattataacctgataagataaataacaacaaaatcaacacccacaaaaaactgtcactacagagagaagcaaggtttacaaaatcgttttaaagcgtaagtaagtagcatagaataatttacaagggattttaaaagctttgaaaagtggttaacatggtttacaaatcgttttaaagcgtaagtaagtagcatagaataatttacaagggattttaaaagctttgaaaagtggttaacatggtttacaaatcgttttaaagcgtaagtaagtagcataaaataatttacaagggattttaaaagctttgaaaagtggttaacatggtttacaaatcgttttaaagcgtaagtagcatagaataatttacaagggattttaaaagctttgaaaaatggttaacatggtttacaaatcgttttatagcgtaagtgacatagatctatcacgaaagcatatgcaaaagaggtaaacactaaatcagaaccaaaatctattacgaaatagtataacgaattcacataagcaaatctatcacaaaacagtataacgaattcaaaaggattttagaacaatataacgaatgtacaaggattttagaaacaaattcaatcatcaaatctcaaacaaaattcaaattcgaagctgaagcaaatgtcaaactgtcgattgaatcaggattcaaataacgagtttacataatcaacaacaaaaatcgaataaaccaattcgaaaacgaagatttaagctaacattataaaatcaaacttgggaaacgcaagagattcgacgacgacacacagctctacttacgacggcgaagatgggttttcagggcgagtaaactcattatttccgacggtatgggattcaacggcattcacaatttctgatggaggaagaagacagagagtgaagaaatgaattaggtctgtgggtagctcattaagggtaatttggggagaaaagtattagaaagggtagaaatgaaaatgggaaaaaaaaagggtagagttgcaaaagggcattgagaaaagggcattgagaaaagggcattaaagtgaattattcttgtcttaatggctgggtatacaaaagatgtgaaaatcacaatctttgctttcttaatatggttaaagtcaaaaccttcctagatattgcataaatttcagttcaaaaggctaaattagctagaaaaaaaaaatcaatcatcttgaaaatttgcagcaaatacatatataaataggaactcaacatatgccttggcttcttgggtgcggcttggtaatgctctcttattaaccgtttcaatcttgaaaaatattcatacacatattaagtaacaaattaatgtttttctatgcaaatataatcgtagtgtccgggtggctaccgagttggggaaaggagatgcagatgcagtgaggttttcaataaaagtgatactcagagtatcaagctctacacttagttttctgtggtcatatttagtatttgtttttgaatagcgttgaggtgtttctcaggcaatggatgatttatcggtgatccatgccgtttcaatctaatactctcaggtcacacatctctattgtctggtaaacgtcgggttaaattctaattatatgtgtcttgttctttttttttactatcaaattttgcgatcaatctagatttgaatgtttgaaattagattttatcgaatttttttcttctttttaattttaagtagtctaaatatttggacaatgcgaacatatatatatctctagtcgtaaaatatctcagtcaattttgctctagatactacatcctatacattcatctacaccatccacatcccacacattcatctacaccaccctcattcatctacgccatccacatcgccagccacatcttacacattcatctacaccatccacttcctacacattcatgtacactattcacttcttacacattcatctacaccatccacttcctacacattcatgtacactattcacatcttacacatttattgcatctatacaagcatatcacaccctacacatacatcttacaagcattctgcgcatatccctatactcaaatcattattgcctgtctagcaccttcaaatttagatttctctgctccgtaacattctccctccatgactccattatcatcactccgtctaccacttttaaaggatatgaatgtgacggatcagatcattttccctttttaagcctttacgtaagtaacacactccatttgattttgtgttcaacataaaccgctgcaaaatgacaaaatcagattaatgatcatccgtttcaatccatttctgaaattttggtacaagttaaacaaaattctatgtacattataacaaaatcgttttcagtgatctttaaccaatgtatttcttagaacgagacagagtatgatctaaattctaagagtactctatcaaatcaacgaacggtgagagattcactaaaacatcaaaagacagaacctcagttttagagttaatttcattaacttctttacccatcttatcagtattttgtgacctatcagatacatatctcaaatgcttttttcttaaaacttcgtaagaacatatgcaagatgtcgtaagcattgtagtttaagcaaagtaaacaaaaacgttacctttgtaggcttgtagggtgatgtctttgagtagcttgtggaatgaaaacatatcacaagaagaaaaacagagagtgtttggacttttgaacgaaacgagtttcagagtaagtaagaagatttttcatggctgaatgatggtagacgaaggtgtatatatagagattacttctaacggtcgaataagttacaggttcgggtaaaatattatattttacaaaagttactgtttgctaattttggggagtttcgaatgaaataaataataattcataacggttagaaaagttaccgtttgctaattatggggagtttctaattaaataattcacaacggttagaaaagttattgctcggttcaaacttaccttttttacttccattgatatatcttaggttgtatatcttaaactaatattttagaattaaactctgaaaaataaatcaaaactgcttagaaaataagatttatttcttagctaagatgttttcataagaaaaaaactataatatgtcatgttttaaaattttaatttaaatgcaaagttaagaatcaattagttcttaaccattggagatggtctaacgttctccctgatgttattggtgtcaatgtgccaaagacgtgtgactatatcagtatctatcatcaaaatgcaattatggttgaagcactcaaaatatgataaattcaactgttttcctttcatttttttgtttgtaagtgatatatactttcttataggcaagatattcttatgtctcttgtggacttattcattccatgagggaagaaatctccaatctttaaaattggatcattgattatatcacaaattcacaatctcatctggattatttagtgtaaatgtgattgaatctccaccatactaaactataccactacattaataactgtggcaataaaaaacactatgtttttcttaagaaaaattattgttttttgtttaactctgccatgcatcattaatggtcttctaagagtttatatatggctttcaatcataaagaatctagtttacaagaatcaactaatcaatatacacactaaactatgattgatagcaatatgaatttacgtatatatcttatacaaaatgatatccatcttattttcaaaacaactatgattaatagcaatacatattcttaaaaatcagcaatggatagagctgatttgtggatttggtatgatcaaaatgatatggtcgaaatgttctcaaaatggattagtaaatcaaaatgaataatttggacacaatgaataatttttattcattcgttcttctcttattttgtggaggaacaatttccagctgaattacgattttatttaatttattatgaaaatggttgtattaaaataaaaggttgaaaatgttaaatgactattcatctcactttttaccatttaaatgaatatgttgaaaaattgattcaactcattcaaccaaaataatgaaaaaatgaacaaactgtaaaggaaaactattcaatcctttcatctactattttgcagaggaatgagttgaataatgttcagctcaaacattttcaatcattcaactatatgttttggaaacaaaatacattcattacgtataatacattttttaaaaatatccacttcaaacctgtattttcaactttttcatcttgctctaaaatgtcaatcattgcagccttaatgtgttcaagagtgatctatcctgaattcctagaaaagaccaacgaaatcaactgattttatttcaataaatatgaggtacttcaaacttcactacatctgtatttttttcagaaacacacacacaaaactcatggtataaaaacttgcttctcattctttcatcttttaaattctcagactgaagacaataaaaagaaacttttttttttttttaccacatgattcaacataaatttacacaattcttacatgtactttataataaattttttacaacataacctttatataaagggaacaaaccccagtttaccgtttaccaaaaatcaagtagaatccattcccatcatcaaccaaaaggccttatcagctttagatctatttcatttccatcttatgcttttctctctattgattacagaaaagcataaacaaccatagtcttgtcttcttcatctgatcattagttgtcgtgcctttacatttcagcgaatctgatggtattgtgtaatgcctcgttttggtggtagctttctcaagatgaagaggaccagagaggagggtaatatctctaccaactgtaatcaagtaacgaaatcaggttacatatattaagctaatgttcatgatcagattctatgattaagctaagagagaggttaccaggtaatatatgaagttaaggatggggtgatctaacacatcaaggtttgccccctcatcgaaagcagcaaagcacatctaaacaaatattaaatgacaaaagctttggttagatttaattccaaaactgactatagcctgttgtagagaagataatccaaccaagaaggtaaggattgatagatatcaacataaagatttgttcatgtgtgtctttaccatgatacatctgatgaggaaacacgtaaagcatatggttgtcacgtaaccaacctaccatacataagagtgaaagtaaacaatcgagaagcaataaatagttgactatacttatgatttgtacaatcgatggtttacctcttgcagctttttgcgccgccctttagattctactggaaaccgttgcaacattaggaaaagcctgccataagatcaatataaaaggagacataattaagcacaaatgcaagaatataatcatttttaatggtactcagctttagcaccaagagaatctagtctagctaggaatcaaagcaggaaaaaatgcaagtgactgtgactgcaagaaatatgagcacaattttgtgtatctaattcctcaaaaatgacaacacagttttagtggtagtgatagaaactatggtaatgtcaaatgtcaacatattagagtggcaacagatttaccttccaccataaagtaaaaatccaagggcagcgaacaatgaaacacctgcaaatataaaattcgcaagagaggtgagacaggcactatggattatatagaaagagtgtatcgataggatcgaagctaattacctgcaaagaacatcttagataggattaccataactcgaacaggcttccaccacaaaaccaaccatagagcaatctggaagtaatacatccaataagatatgccatgaccccacaaaaaccaaacttaaatttcttaaagattgcaagaatacctgaactacatatacaactgcattaattgtgaagaagcttggcctgagtccatcagtcgatactgcacgcgcctgtccaatcaaaagagtgttaagtaaaatatcaaaaccaaagaagcattgacaaaaaaagaaacccatagatactcattagaaactacctgataataaatttcagcccagaaaagaaccagaagagcataggtggtgaagaaagcaagacttggaatatcaagcaagatatgttgcagaatctacaaagataacactgcaaatttagaaggttgacacaataaacaagtcaataagattaaaattacaatgatggtgaatgatcctaaacctctggttgcataaactgaacatttcgcctgaagacaaacaccacagcacgaactaccagatacaagatgagccaaatcaatcaatcaatcaacatgaacacacgaaatcaaaatccgcagcaacactaacctccattaacaacgaaattgagaaagtgaaagaccttttgcgtcgtccaaccatattcaggaactctcaattgtattctcacaagttgaatctaaaccaaaatcaaacataagatgttacaccaatttcatcgaagaatcatcaatcaaatccagaaacgaaacgtaccacagcaacgagggaaacgattccgtagagaacagcgagaacatggaagatacgatcctgccaaatcggagattcgtttacgtctgaccaccaattcgaagcttctttgagattcaacatctccaccgccgacgaagacgacgacgacatcatctccgacgcaaatttcgtaacctcgacgccgccgattctcatctacacgagtcagattccttctcgattcagattttgaatatacataatgagaactctctggatttgaatcacctctttttatttctttctttttttgttattttcccgaaataaaaaaatttggaaaaaaaacgacaaaaatgaaaaagaaacggccgacgtcggaaacgagaaccggagatagccggtaattatcgtcgggagagtcaagtagttgttgaaagttgactgacacgctgctccacgtggcacatgtggataaagagcaaaccaaagctggcttgatccacacaaagagaattcaaatattatgcctaatcaagtgaagcaaagtaagctattatgattagagaatgacagttatggtaatttttacttttttaattgatctttcttacaatagatatcttcagggccaggcccaacatacaagagtcctcatatgagatcattttgtttttgcataaaaaatttttttggtttttatttttaaagtgagagaaataaaaaaacgtatacctacaaaaagcttcgacgatagaaatttattagctgatttgcagattaatggaagtaagtatgtaagagatttccaacgatgtacaattataactgcttgttaggattctacgcaaaaaaaattgttgaaaaaatgtccatcaaaagcatgaaaaaagaaaaggtggtggcggctgtcgtagatctaataacggttggaaggaattgttcgtagtataatcgactatataacagtttatataatttgtaataaataataaatcgacgataaaaaaaatataattaattcgagattaagaatttttggaggtttgggttttgctagtaatcccaaaaaattatatctacgaaacgtagaaattttccaaaaattctaaacatcagctatattcgcactcgatttaagtacaatccgtgattctcactttggagctgcaggcttgaatctttgaaaaatgagaattgttagaagataatactaattatgtaggaattaatcttcatgatgaatcaccgactaggcattcgtgtgttgctgtgttggattggggagtacaatagctgtcataatactatatgatcatcttcttggtcaaatggaaccatttttgtctttgaccgtcaaataggcatggccttacttatgggccttcaaagacagcatgagcatcctatggaggccaggccaccacttttttttcttcgtaatgataatatacttttttttgtgtgcctaattgtaaaatacttctatagtcctaattagaggtgtcgaaatgatatgttagctcatgagatgagtcaactcagcttggttttttatcagtatgaatgaaattcatttaatagatgagttatataatcaagtataatttagagtacaaattatatgaacgagttttaacgaacatgagttaatttatgaattagacattttaaaaaattaaaagaatatatatacatatataacatatataactaaatacactaatatatatttttttgttgccaaattgtaatatacttctatagttctaatcaagaaataatgtttagtgaaaaatatatataacctaaaatctagtaagtttctcaaaaaaaattgcatttttgatatcgaatttttatcactttaggtatcaacaaaaaaaattaatttgttgtaaaataatttaagtacaaattaagaagtgcaaaagcaaaacagaattaaattaagtaattaactaaaataagatgtgtttttttgggggtcaaaagttaagattttaatattttgaattaatacttttttggggggtcaagaattacaacaaactctagtctatatagagaactgaccaaataatataactatagtattatttgggtaaaatttcgattcaaatagcaagtcctgcgttataatcaacaacgaatttggatgtgaagaattatgtaagatttatgaactatagatcaagattattgaatgtcccttaacttcttctttttttggcagatggtacaacagttgcttaacttaaaggctccatcactgtgaatgtcccttattttgatgtcagcttaagaccaaaaaaaaaaaaaaccaaaaaaaagaaaagaaaagagagaagctttgagaaagaaagaaagaaagacacagtgtgtatcaatctctgtactttcacaagcttccaagctctcttatcattcactgtactcttcctttcaaataatgcttctgagttctgataacaccaacaatctactactactattatattttcttacacattttgcatcactctttttcaggatttttggttctcgagaaaaaagtgaagatttttgagattctctttcgatggattacgaacgaatcggaaagacccaggtgagaaaatgcttcggtttcacgtttaccgaaactgggttttgcgtaaaattagggatatcaaaagccagatttgtcaattttctgatttcttacttcaaagtacaaactttccttttgcaaatcacttcatcatcatctctgtttttgatttgataaactctgtttcctccgatgaataggttactagtagcggcggcggattttctccggggaagttaaggagtatgcttcttctaggtgttgatagaaagaagaatgaagaagaagaatcaactcctacaatgagatctgggtctaatcaaattgatgaccctagggtttatggtggagccccttaatcatttcttaatactctttttaataacgccttttgtctctatttgaatctaaagtttgcatctttttttctttgcttttgttgttttcaaatgttgtagttgctagtggattagatgattgcaaagatgttgatgttgtgagtgagattactgattgttctacttcagggatagctagatcgattagtttgggtcttcaagagtattctgattatgataatgtgaatgagatcaagagtgtttctgcatcatctgtctttgagtttcaaaagactgagaaggaaaaagttaatcaaagaatgcctattagatcattctctaaaccagctccatctaaatgggatgatgctcagaaatggattgctagtcctacggctaaccgaccgaagactggacaggttcaggttccgggttcgaagaaagggcctagctttggtcgtcagtcttctatgaagattgttgaagttgctgaacatagagtggttgaagagcctgatacaaagagaatagatgtaagccaagtgaaaaaggatatgggaaacaagtttggtagctgggaagttgattcgtacactaccgtggattcatatgtcaaaccggttcttatggttgagaactctattgtagaatcagcaactgaaggtggtgttagctagctctttgagttattcagtttgtatgctctatttatcttctaaagccaattttacttgctttcttgcagttaatctcagccgtcatgactcgtcagtcgcaactgcgtttgctcaaccgccttcaacggcaaggtctgtgtcaatgagagacatgggaactgaaatgactcctatagcgagccaagaaccttctagaaacgggacaccgattagggcaacaacgccaatacgaagtcctatatcttctgaaccttcaagtccaggcagacaagcatcagcttctcctatgagtaacaaggaactgtcagagaaagagcttcaaatgaaaactaggagagagataatggtgttgggtactcaacttggtaaatttaacattgctgcttgggctagcaaggaggatgaagataaagacgcatccacatcattaaagaccaaagcttctctacaaacttctaaaagtgtttctgaagctcgtgctacagcgtgggaggaagcggaaaaagctaagcacatggctaggtagtccaaagttgaattgtttgtcatagtcctctagttattctcgaaactttaagcttatgatgagttctgtaatctccaggttcagacgcgaagagatgaagattcaagcatgggagaatcatcagaaggcgaaatctgaagccgagatgaagaaaaccgaggtaaactacactaacatagctacgtaagttcaagtcatgattgtgaacaaacttggaaaaacatgaatgatgatggtggagttcttgatattgtaggttaaagttgagaggattaagggacgagcacaagaccggttgatgaagaaactcgctacaatcgagcgcaaagcagaggaaaagcgagcagcggctgaagcaaagaaggatcatcaggcagctaaaacagagaaacaagctgaacaaatccgaagaacaggcaaagtaccttcattgttgttctcttgctttagcttttgttcttaaatccaatcctattgtgaatgtgatgttgttaattctcaagaacacatctttctatcatcatttgtataataaaagctttgaaaaacttatttcttgtgatcttttagttgctttgtacatcttcaaattttggttttgagagatcttcgaattactcggttcaagatgtccttaccaaagtgaaaaccaaagttttgattttggtttggatttaattttggttagatttccttaccaatgtttgattgtaaaagatctaccaatcggtttacaattttggttcaagttcggtttaaatcaccttatcattgtctatttcacaacattccaaagtcgctggttccatcagaagttataatatcaaggcaaacaatatggctaacaaataaaccaataataaatccccacgtgtcagtatttgattgattacaaataaaccgaacttgatctattgatatttcccatcacataagaaaaaaaaagagccaaaaaaaaaaacttttaggcttagctttaaagggcacacacacacagtcgcgagtttctctctggtgcgctctttgtggcggctcgtcttcttcttcttcttccacgggactctctctgaatcggtgattttcgatcttcctagggtttcgatctgaaaccttgcgatctacttgaaagagagattcagaaatttccaagtaataataatgtttgcgcctgcgactcaaccgcaacagcaacatgagcagaagaagcaatcagagactgtttcatctgctgaagaagatgctttgaagtggaacaccgattgcgtttactttctcgcttctcctttaacctgcaagaaggtaattgatttttgattattgtttcgcttagatcttatccagtttctgcttcaattagggttttggatttgagatctcaagtttctttcacccgatttcaagtttctctgtgtttttgtgtccctcgaagctatctatacatacttcacttctccatctgcttaattttggtgcgagatttagatctggtgatttcgaacctcgtgattctaagtattgttgtttcttagggcttcttgttagctagattgaaaattacatatacaaagctttataaggatgttctgataaaggagattttcatgttctgtgaatatgatttttgctcgatgtgtatgtttatgctgaagaacgattcttatggtttcttccttttttgcttacagggacctgaatgcgagtatcgccacagtgagtatgcgcgtatgaacccgagggattgctattattggttgaatggaaactgtttgaatcccaaatgtggatttcggcatcctgtgagtttactttcttcctcaatagatagtctctgcttgagcttcttgagttgtattatcaaagtgtgcttatgtttgtggttttgttttcttacagcctttggagggattgttgggaaatcaaggaggtgctcctgctgtttctgtacagccaatacatgcaaccgcgcagcatcctagtgttgcaaaacagcctgttccatgtctgttctttcaaaaaggcatgtgtatgaaaggagatatgtgttcgttcttgcacacgccgaatcctgctgcgtataaaaaacagcatcctgtagaagctaagcctgctactgatcctcagtgttctaaaaagccaattgaaaataacactgaggagaagaaacttcctgatgttaatctctcaaaggtggttaaaggacatactgacatatcggctgcaccaagagtcgcttctactggactaagggatagtagaagtgtagagggatacattccaaaccatgtgggatatgagcctgttgtgcagagaaagggtccaggattcccttcttttactgaaggaggccattctactcagttgcttcagaaatatggatctgatgataataacagtttccacaatggtaaggatgcagatgacgttttaagagagtcgtctcctgggtttgatgttcttgtggataatgaggctggagattctgagtattatcatgttgaagatcgatatggacgtagaagtcaggagagagggaactcagagtatgaccctgatttcagtgcaattgctgatggtgataaagaagcattacgtgaacaacgttttgattcatatgatcggagggaagacaggggatggggccatcgtcgagtttcttctgagagagaggatcgtttggacagaagggtttacgcagaagatgagagatcagagaacatactggaatcggatctgagatatcgtttggctaagcagagaaaaggcaatggtatgagattatcagtaggaggccatgactatgctgctcctgactcttcgatggacagaggatatagagagtctcgtagggatacaccgagggaaaactccattagcagtagtcgtcttcagggtagaattaagcttcgtgagagaagcaatggcgaagagggtcaccactttgacaggagaagtgagaggggaagggacagaagcgagttaccttctcagggtagactccgagatagaattaagggtaggttagaggaaaaccatagtggtaatcaggaaagaggtttcggggctccatgggcgagaagaagagaaatggaagacgaaagaaaatcagctcctaaaagcagcagagaggaaagtaagccagagccatctcttgggaagaggaaaagctttgaagaggatcatcatagtcataagcgatcaagggattcatttgcagctccattgcctttcagtgagattctcaagagaaaaaaagcggccgcatctggtggtagcagaaacaacaacaaggacgagacgatatcgaaagaggaagctggagatgagatcaaactcataaccgaagagaaaaccgaggttgtctctgaacccaaagctgaagtagaagaagaaggaacggttatggaggaagaagaaattgttggggaggaagtgtatgaaggaaatgaagacgagcaagcttatgaaggcgatgagctaaacggagagtactattacgaagaaggatatgaagaagagggaggagaatacgcttacgaagaaggtgaagaagtagtttacgcggctgaggaaggagaagaagaagcaacagaaggaggtgaaggtgagggtgaagaagacattgagaagaagaccgttgagatgttgtcataaaagaagaaagagtaacacagaaaaaagcttttgctcctttcctctctctctctctctctgcttaatgcaaatggagagaagaagtcgtagagcaaataatacgagtcgcttttatctttggcttggcactgagttttagtcgccattttttcttactgtgatttcttaaattgtaacactagagaagaaagaaaagaaacaatggtacaagtacaccatatcatatttctgagttttactgttttctaatctgttttgatatattactttttcctcaaattaaaaagtatttacagtaaataacttattttagcttttaacaccttttatcattattgtttttgcacttgcataccatgaatgatgtaataccactttagcattattgtttttgccctttccataacatgagtaattatgtaactgatttccaccaatcaactttaaagtatttacgaatttagtcgaccaatctaattaaccctgagttaaaaaatgttatgagaaaaagaagactgggcccagaattataacttttgggcctatgtagcccgtttccaaaggcccataaatcattattttacaaacaagaacaacaacaggtaaagaaatagacttggtggaaaaaagcaacaaaacccagagttcttcataaaccctactttcttcttcttcttctccttccttcctcttcagtagaatagttgaataccatagaatacaatgtctctgagttaaaccatgaggctcattctattcacttttaacttttttcctgaaaatgttctgttctcttcgcaattttcttcacgttaatcgcagattccctcgccatgtaagcccttcttcttcttccctctctcaaatccaatcacctctctgtttccctctctcttctccttctccttctcaatcttcctttatctcttgccctttcgtttggttcactagttttctctgtatcattcgataccctttcgttaccaaaagcggtacttctacttattccgaagattttgatagagattggatccgtaaagttgttcacaatgatctatgggatgatcctggactcgaaaagctttttgatttgacattagctccgatttgggttccaagggttctcgttgaattgaaagaagaccctaaattagctttcaaattcttcaaatggtcgatgactcgtaatgggtttaagcactctgtagaatcttactgtatagtagctcacattctgttttgtgctagaatgtattatgatgctaatagtgtccttaaagagatggttttgtcaaaggcggactgcgatgttttcgatgttctgtggtctacaaggaatgtgtgtgtacctggttttggagtgtttgatgctttgtttagtgttttgattgatctaggaatgcttgaggaagctattcagtgtttctctaagatgaagagatttagagttttcccaaaaactcggtcttgcaacggtttattgcataggtttgcgaaattagggaagactgatgatgtgaagaggtttttcaaagacatgattggtgctggtgcgagaccgactgtgtttacttacaatataatgatagattgtatgtgtaaagaaggagatgttgaagctgctagaggcttgtttgaagaaatgaagtttagagggttggttcctgacactgttacatataattctatgattgatggttttgggaaggttggtcgattagatgatacggtttgctttttcgaggaaatgaaggatatgtgctgcgagcctgatgttataacatataatgcattgatcaattgtttctgtaaattcgggaaattgcctataggtttggagttttatagagagatgaagggaaatgggttgaaaccgaatgttgtgagttatagcactttggttgatgcgttttgtaaagagggtatgatgcaacaagccatcaagttttatgttgacatgagaagagttggtcttgtgcctaatgagtatacatatacttccctcattgatgccaattgtaaaattggtaatctctctgatgcttttaggttagggaatgagatgttgcaagtgggtgtagaatggaatgtggtcacttacactgcgcttattgatggcctttgtgatgcggagagaatgaaagaagctgaagaactttttggaaaaatggatacagctggggtgattccaaatcttgcaagttacaatgctctgattcatggatttgtaaaagcgaaaaatatggacagagcattagagcttttaaacgaattgaaggggagaggtattaaaccggatttgctgctctatggaacgttcatttggggtttgtgcagtttagaaaagatagaggctgctaaggtagtgatgaatgaaatgaaggaatgtgggatcaaagcgaattcgctgatttacacaacgttaatggatgcgtactttaagtcgggaaacccaactgagggattgcacctactggacgagatgaaagaacttgatattgaggtcacagttgttaccttttgcgttttgattgatggattgtgcaaaaacaagttggtttctaaagcagttgattatttcaataggataagtaacgattttggtctacaggctaatgcagcgatattcacagcgatgattgatggtctctgtaaagataaccaagttgaggctgcaacaactctttttgaacaaatggttcagaaggggttagttcctgacagaacggcatacacatcgttaatggatggcaactttaagcaagggaatgtgctagaggctttggctttacgagacaaaatggctgagattggtatgaagcttgatttgcttgcttacacttcattagtctgggggttatcgcactgcaatcagttgcaaaaagcgagatccttcctcgaggaaatgatcggggaaggaattcaccctgatgaggtcttgtgtattagtgtcttgaagaaacactatgagcttggatgtatagatgaagctgtagagttgcagagttatctgatgaagcatcaacttttgaccagtgacaacgataatgcactcccaaacatgtgatactcatgcaatctctttgctcttatcaatggattcagatattcggatcaaaaccttgtttcttctagagaacatgaagaacaagaaacaagaatatcgaatcttcagcctaagcttctcctgggaatctataagctagccattcatcgtaaacaattattgcagctgtagtttccctgatttgctcaggactgatccgaggagaaagcttatcgatgggatatattgttcatcgaaaagagctgaggtatgaaacaaatccactactttgaatgatttgatatgaaaatctgtttaccggtctcggataaaaatgtagtcttttgttgcagattttaaagctctgaagcatatggcaaagatgaataaagagtgaaagactgtcaagtatcaagtaatcatacttacacatgggtttaggggttcttcattgttgttttgtattattgcattgaggaaccaatcaaaatccctaacttttgttgtgtacatattttttttttctcattcccccaaaatgtaatttttttaaactgatgattgaataattagttttgaacaaaaaaaattctcaatgctgaggagtttcagattcatgtatataaactacaaataaaacaaaaatagtcatagagaagtttaaaacaaaaaaaatgttatgtttaatatttaattatttaaaagagctgcttatttagattcagggcaaatttagttgtgaaagtttcacaagactgagtggctcggtaacaggtgtggagtttggagccaggttcggagatctctgtcaccgtacgataattctcaggtacggatccaggttcggattcctctctctttctctcttcgtcaaggttcgtatagtcgttaaatctccagtagagagagcaaactcaaagcttagaagatgcaatctctagacgattcttcatcttctcgagttgaatctgtgatcgaaaatggttgaattgttactaaatcgattctgatttcggaatttgtgtgtttatggtttaggaagaaatgggagctagggttcaagtacaacattacaatttaggatcatctgattcctacatcgctacttctctccacgatctcaactccgtcgatggtccgccgagagatatcgacggtatcggaggcgccgttggtcgtgacggcgatagtttagataatgacggcgattcctcttctgcggtgtgtctcaatttctagggtttatgattaacttagctcaaattagcgaaatgaatcaaaattagggtttatgattttgagagttatcaatagatttggattttgtctctcttcaggactgtatgcatgaatcatacagaaactctatgcaaatcggagtagaagaaggtggatctaacatggagaacaaaggatctgcttacattatgttaaacattgaaggtataataaggatcatcattctcagtactggatttggctcttgcactgagtttcttgattcgttatcatcttcttattgtgttttagatgtttcaccgattgaagcagcaagagggaggtttctgcaaatcatattggactactttattagccaacatgtgattgaagtctgtgagagcaaacgtgatcatgatgtggattcaggaggacgtgatagtaatagtaaagtgaagaggaagtcggatgatacgcgatatgaaggtgatccgagttttgcgttaccgttgatgtatattgcaaatttgtatgagactttagttggtgaagcaaatgtgaggcttgcttcattgaatggaataagggataagactattggagtagctcttgaagctgctggtggcttgtataggaaattaactaagaagtttcctaagaaaggtattttgtatctgctctgatgtgttgcaaaagtgatatttttgagcactagtttgatatgtgtgattgtcccaggtacttgcatgtacaggagaagagaactggcaacttcagttgaaacaaggacaagatttccagaattggtaatacatgaagagaaacgagttcgctttgtggtggttaatggtttggatattgttgaaaagccaagtgatttgcctattgaagaagctgaatggtgaaaatacatcatcagatctttactattgtgaattgtgtatgagttatttacatcagaatataattggatattgtcactacaggtttaagcgattaacaggccgtaatgaagtggctatctctgctagagattataaattctactgccctcgacgcaagcataggcgtcttcagaattctgtctccagcatcaatggcttgcctgtaagaccaatcaacactctgtttatagcttttatctgagtttgaagaacaaagtgacagtttttgtttttgttttgtagacatttccaggtatagactcttcaacgttagctaatacacaaggatttcgcgaagtaagtgcatactctttcggaatctacaatcaatggcaaattctaatggaaatgatcttgagttcatcgaatttatcaaccatctttgtcataattgcaggatcaaagccaacaacaacacactccttctccttccaaacatcatatgtcatctttgtctcatcaatttcatcaatctattcaccagagccaccaacaccatcaatctatataccaaagtcaacacgcagccacacactatcccagtcagaaccatcaatgtgaccctgaactatctcacacacaaatggcttgcttgcaacccctcactggaggccatgtaatggtacaaaatctacgctatatctattttctaatagtataatttcgatttccattaaggtcctcgtatgtttatctgtctttccacagccaaatagtccggcgaaattttgtgaccaatgtggagcacagtacttgagagagacatccaaattctgctcagagtgtggttccaagagactcgggatatagtgaagagagacaaatctttgctcgagtctcgggttgaaatatcgttttgaggcacatattttacgagaagtttagtgtttcaggttggtgaagtctgagctagtatatatttacttggcccggaagtagttaacctaattttaattaaagcttgaatggttttggctatgtaaaaatgtataattggatagattttgatgaatataattaaaccaaacacatagacttgaattattattaaaaatccattaaatttcttaaataatgagatagtatatagtatatatggagagaggacacaaattaacaaagtgtgtcccttattattatatagaaacaatgatcaaatagagagtattgaatcaacattgtttggtgcacatacaacgacggaaggctccatcgaattcgcagtgaccgccatcaaagtgctcgaattgttggcagatgatggcacaattgtttgtgcttatgcacactcctgagaaacgatcactccttgtcttgcatattttattatccaacggactcacctctatataagaaaaaaaaaaaacatttgaatacattaccaaaatgaggaatatcgagaaatatgttatagattatacgtataaaatgtagatatgtatgaaaatttagagtaatgatgaacctgcagtggtagcaagaaccatgaaagcgatcaggagaaggactgagagaaaacgcagagagagcttcatttttggagagagtaagagtttatgaatgtttgtagatagagatcgttggaaattactaagtggtggtgtaggaagaagaagtggatggcactatatatatacatgggattcaatgtttctcctaaacacaatctttgacaagttgacatatgacatgcttttttgtatctttttttgacaaatccaaatacatcatcattatccattttcattagatatagttatataattctattaagaaaatatctaaaacatattttcctacatgttatctttgttttcttttttatcatttaaatttaaaaaatcaaaatcaaataattttaagatattaaacattataataattattttatattttttaccacatatggcatattgtcctataatttacttctattttctctttattttgataaacatagtttatatgacattattattacattatttataatgttattctaattaaactagatttcttactttgtgcttttcaaatagtgttcctttacatgttaaactagatttatttattttctcttcttttttttccttgatttgtttttccatttaaataaaaaactaacaaatttatgataaatcttatctaaaaatttaagaattctcctaaacgtggcatcccttctatacaccttatatttttttcatttaattatattattatatttaaacaatatccgagatacacattattctacatttttctatcatttaaaatcaaaattaaatatcagtttactttatgctaaaataatttcaagatattagatatcataataccttcttcttctttttaccacatattgcatattatatctacaatttgtttctgtttttctcttaaaatatcaaattactttatgttaaaaaaatgaacatataaaacattctaatctttctttaattctttttaccacatatctcatatttatattattctaaaaaattctctctctttgttttaaatttatatataaactaaattgtactataagaaatatcgatatattctgaataattttattttattttaattattttgaataatattttgtttgtagagaatctgaaagtctgaaactccaaaatttaaagagctagtcataattaattagtacattgtacattattttcaaacgtacgttgacaaaacaatgtacattacttatttacttttaaccatagtcttacgtaaacttgtatgtaatcctgtaaatatcaataaagtatgatatataatcaatgcaaagtatatttacatggcgaatgatataataagccaaaattaaaacaatacataaacacttaaaattcttacgaaaaaaccaacattatatatacaagaacacaaaacaattggtccctttcaagattattatattactctcgaattgaaattagaaaacgatgaaagatatgataatattattgattggtttttgatttcgaataaaatgatttgttgataaattagcaggctttggagcagtagcaacggagactactacatcgaccgcctgaaaaaccttcgctagggcaagctttggcacagctctgtgagttgagacaaactccttggaacttgttacttggtgactcacaagttcttgcttccacaggacccattcctaaatcacaatacccatgcacgtaccataattaaaaaccatgcacatgtttgttactataatcaaaatttggaattacaaaaacatgcatgtgttataatttgtatgtatataatcattagaccatatataagatatttgaggccacaaaaattgcttatgttagatattattatgagaattagtaatgaacctgtggcgaagaggagcatgaccgacatgagaagggctgagatcaaacgcagagagagcttcatttttaaagagattaagatacaaatgtttagagaaagctaatggtagttaagaagatcaagaagatgacactatataaaggggatgaattcttttgttggtaaaatgtttggttttgtttttacaaattaatataaataatttatggccttacaaaaaatagaaacaaaacgtgaaccagttaaaacctttacccatatagatgcagtcgtaattaaaggctgaccaatcaattaaataatcaaattagtatttaatcctaaagaacaaggaaaaaacttataacaaagaagaatgcataatcgtcttgatcaacgaataaaacttttctaatttttctcttctttatacatcttacttaatgacaagagatgaataataaattttacacgtttatggtaaatttgcacccttaaatcttaattaagctacataatgaaatcctgattaattattaaattcgaccctccaaatactttttaaaaaaatcaggatgtgtttaattactactttgtttagtaattgttaatttgctttaataaactttttcttggttgttaatttgtttacaaattacgactatatatgataactagattttaacccgcggtataccgcaggacgatttattttttaaaagtaatatatattaaaatttgcaaattttatttttataaaatatttatattttacactttataattgttattaagtaaggctataccacgaatctatgagacaattgttaaaaaacgaagttgtaacctctattaaaacagcatattaataatattttaaaattttataaatattgattcaaatacatccaccatataacccaattccaaaataaaacccgttctataatttctttacccctcccgtgatttctttttttaaagtagtaatttttaaaatttaagaattattttttatagataaaagttttgcaaattatatcattctctaatacatttatattttatatatagtaacattatacataccacataacatttttggttttatataatcttttctaaattaggatgatttgatatgtttaatattagtggtcttaaaaaataataaattaaagatttaacccgtattgaaacggtgtattaattatattttacttttttattaatgttgattcaaaaacccgtcactccaaatccgtcttgccaaaaagccatttattttattaatattaattttattaatgatatgactctgaattataatctaaacattttagctaataacataggagtataccatttttatttaataggggaatataccatatgacccgaatgcatttttaccccaatccaccaaaaaagtcttgcaaaaatactatagagataagaaacgatagtcggttttgataggtataagattagcaaatatattagttagcttgaattagttaaagaatacaaattgaaaaggtatattacactttattcgaatatagtatcaaaacttatataacacagagatttgataaaaaatttaattgttgaatttttttttttgtgctaatttttatgtgattaagatttaattaagatttaattgattttgtatataaaatattaaaagtaaactgtgagttgtatatgttttgttgatattatctatattgtttagtgtttaagattatacacttgtagtttgattgttaatttaagagtttcacctgtagtataccatcttgtattaatatcgatctaaacccgtcaattctaggattttctatcttgtattaaaaattgaatcatatcatacacataaaataatctaatatgttattaattattgtagtatataagattataaattttcaatataatatgtatgaaattgaatataaatatttcaaatatgaccccttactcagtagaaagttttcttaaatctatttttcacccgttataatatttttcatgtattgaacagtttatattcacaattttcaaaaatttaaattatgagatatgcgaaaaaactctaattattttttataatgatgatattattttttgcaaaaatagaatcatataaagataagaagtgaactataatgattaataaaaaattaatatgataatttagatatcaaatctaatttgttgattttaataggttactcttttggaaattaataatgtatttcgtttttctaattaaattaaattaataaaaatttagatatcaaatcttatatgtttattttgattggttattatttttgaaaattaataatgtatttcgttttttaattaaatttaattaattaaattagtaattgattttttaatccttaaagagataaattaatttactctttaaaattttatttctaatggcatacctatgtaatttcttacaaaaattaaggttatatttaaaatgtacttcccaaataatatagtaggatttttttcctcacataagttgcatgaaccgaatttaaagtaaagtgtacgtcaataagatcgaagaaaataaacatgtaaatatatagagttagtttactatatagttgatttaatttgatatatgtaatgagaatcagcaatgtgtgttgcagtagcaacgccggaggagtccgtcgcaatcaccatcgggaaaaccttcggtgtggcaaacgttggcacagttgtcttcactcacgcacggtcccttgaacttttggctcctcgatttgcaaatccttgcctccaccgtgaccgaaccccctaaagaattatataaaccatatagaatatcgtacaaggcaaaaaaacaagacatgtttatatgagtgtatttgtgtatgttgcatacatgcattcacaagaatcatcatagaatatttgactttctatatgtgtgatggataagtctaggtttcagtatatacgtttgttttctaattacacaaacacgagatatatagtataaattaatacgaaaactattaccagtagcttaccaaaactaccttctatatagacacactacaagcttactataagctttatgttttgtccactcgtttttcatgattttaaaatattctactttggttatcaaaaaagaattaccatcatagggtcatatacatacataaccatgaataacaagataatacacatatatgttattagcatctcgagaggaagcataccaagaatttcatagacaatgaggaaagatcaatatacactaatatataaacatgagtctatttactcatcaacaattgatttgaacttagacgttcattataatgcttgatagatgaaaatggaaagactcttctaggtaatcgacatcaaataaatatcacatcgacattatcaactttgggaaaactaaatactactttgattgtattagttttaatatagtggtattaaacagagtcattgtgcatgtagactttgactttttcatgcatgggtaaaattagtgtcaccaatataattaacctattttaataagagtctaattaatggaaaaaaaagctcttcctcacctcaatactcaatagtgtcttttcttctgtcgctaacgccactatgtattttttgacagctacatttatgtttctttaacaataccattaagcagtacatgtgttgagttgtaggtaacaccaaagacacgtgtagtaggctagtagcaaactctccatttgttgctttacactgcgaaattagatatgttggattttattcattccctaggtcgttatttaaaagaggtattatttaaccaacatctacattacaaataccaatgctatatactattcatctacacagtgaatgatctttttatatactgattttgaatggtaatcacttaatattccaaaatagtgtatataggtttgatatttactaatcataaaagttttatcaaaaacgttaaaaaaagttttactctcagtttttttttacaactacttctaacagttttgcattattttgataaaactaacaactacagctaacaattaaaaaatttgtacgactttttgttaccaatttaatttctaaccagattaactctatataatcgatcggttctctcaattctattcgagcattattgtgatttactttgcagactccggttattaaaaacttttagattgagatccataatacaatatattaaaagccattaattgatttaacattacattaaaaccggaaacacacaaaccaatgacttattcgagaaaacactcatgtacggtacgacatggtaccgtacggaagatttagataagaaagaagtaacacactgacgatggatcgaagatttgagtcatgagaatggatggatcagcagtgtcttgtgcagtagcaacgacgacggaatccacggcatttacctccgccgaagccttcgttgtggcacacgtttgcacagttgtgtgtgctcacacatggacccttgaacctatggctttttgactcacacgtgcgtgcctccacggtgactggacccatccctagagaatattaacacacacacacacacaaaaagctttgtttagaccatagcttagtttcaaaaagatttgcatagatattaagatacgagtaatgaagtacctgtggcaatgaataccatgaacaagagaagagcagcggagataaaacgcacagagagcttcatttttgagagggatagagagagatttcgaaagaagtgataagtgtgcagactgtagaatgctaatgaggaagtgggcactatataaagagactggaaaggtataagaacgctcgagataattgaacttttactaaaagaaaacgaatatctttttattccattatacagtattcactttttatttctgccactgaggtgtgacgacgacttgtcgttttttttcttgttcttatttttcctgattttttcacattttcttgttttgcaattttgtcgatttatttgcttgaccgacactgtagtaaatgtaatttttggtcttaaatggcagtgacaagattaaagcaatttttattttatttaaaataacaaaaaaaaagacctataaaataagtaaataattgagttagtcagataatgaggagtccacactgactgagtcgatgatagatttttggtattataaacgcagcacttttttttgcttttttgtcaacaatatactacacttgtgctagccatctcgcgaaaacaatttttgtttgttcgtatgttccaagctctgctcctagacttccatcatcgccgattcattggtattttagattcaagacttaactctatgattgcataaatcacatctgattttgttgaaatattttcatcaagcaaaataaaattaaaaaaagagagaagaaaatcaagttaaagaaaaaactaagcagaaaaaaaaatcaaacaaaaaaaaaaatagagcgaaaaaaatcatgaatgaaaactgttacaatagaaattagtaatttactatttgtgtgttagaatcataactttataaataaaatgattgtgttagagttttaagtatagacataaaaaaaaaaacagagaaccacaatgaaagaattaataaaataaaataaaattttttacagacatccataatttaagaaaaacgtttttatacttcatattgttaacttgaattaaaattctggcatatttgcaacaagaacatatattcgaaccctttattttcttttataaaagccattatttgatgtaacgttacattaaaactgaaaacacacaaaccaaagacttattcaagaacacactaaacacgcatacacgttacgatatgttgtcgtacggaatattagacgacggaaagaagtaacaaaacacaatagatcgacgattgagtcatgcatgagaatcgattgatggatcagcaatttctggtgcagaagcaacgacgacggaatccacggcaatcacctccggggaagccttcgttgtggcacacgttttcgcagtttgtatcgctcacgcatttacccttgaatctttggctctgcgacgcacacgtgcgtgcctcgaccgtgactggacccatccctagagtacaaaagaaacttggtttaagactatatatagctttgtttcatgttctcatgcatgatacatattaactaatcttgaaagttaatgttagaatttgatattattgctacttaataaaggcatccatttatggctaactatataactaaaatcgtataaatggaaaggccagtcgataagaaccacttaaatatgtgcatatatatatatatgaccaaatgatgaaaatagaagaagacatgggtggtgtgcaaagttagatatatggtaacgagtaaacgaacctgtggcgacgaatatcatcaccaagaaaagaacggctgagatcaaacgcatagagaacttcatgtttggagaaagagaaagaaaattgagagagacagagttggaaataagtgttatgtgtgtgtgtgtacattactaaggatgaagatggcactatataaagaggtatcgggatatttgatagtctattagagaattgcatttttaagtatttgtttagatattttgggggtaaatatcatctttctcggataattcacttttgatttaaaccaaattcgtaacatttgtcaacatttttcttcttttgactgctttttccacattttctttgttttctaattttgtcgatttatttgctttaccgaccctagtcataaccgttaatctgtccttaaaatgcaagtgacacgacatgcagagaaatcctactggtttgacaactcattctggaattaattaacaaacagataaaaaaaacgtatgaagaaaggtaaaatttgagttagtcagatattggggagtccacaataatagtgaccacgtcaaaagtaagaaaagtgtagtcaaggacactagagttttgttaactttttttatcgtatctaaatgaaaacattacgtgtttaaatggtaactactatgaataattagtctccaatagtacttaaaaaaaaaaaaaaaaactctctgttctctttcatagtagcttttctggaaaatttctccttcgccgttaataaagccgtcccaatcgatttgaccataagaacttctccctctacatcagttttttgatatttgagaggaggtaagtaccgaagatatccccgttttctgtcggcaaagatatattcaccaagtttaggtatcaggaaagtgctttcttcttctatcagtggagatgaacatggacttggatcaagcgataaaggaaatgtcaattaacgaagatagcctcttattttgtctaatcaagcgcagttttgctcgattgacagaaataattgcagtttagtggataggtttttgaatctgtcactccaaaggatgtctaattggatattagacatgcctagaatttggaggttgtattcaagggtaagaggtgttgctttatcccaagagagatttcaattctttttcaaatcagaagaagatttaattgaaatcttaaaatctggagtttggactcaggatgagtggtgtgttttgatggagcgttgggtggaaaaaccttcagatgattctcttttgtttcttccagtctggataagactccgaaatattccgatcaactactacacagaagatactatcaaagaaattgcaggatgtgttgggaaagtattgactgtggaattagatttagaaaaatctcaggcacaaaattatatcagggttcaagtgctctttgatgttcggaatcccttgcgtaactttaaggaagtcctgattccatcgggtgaattgatttcagtttcctttgattatgaaaggattcgaaaaagatgtttcctctgtcaacgactcacacatgagaaaagtgtttgcccctttgttagcctcggaaactctaaagaatcaaagaaagatcttagtttttctgattcaggatttcttgatggaaagagttgtttagtgaatccaggagagaagattgttcctaccaagttaccttctttatccgctgatcaagcatcttcaatagattcggaagggttcccttttggatttaatgaatcgggggcatcaggattaagtattaagcagaagaatccaagaaaaagaaaggcttctatagttcacaataagcaagcagctcgtgatggttcaaaagaaaaagaggttagtcttaatgttgagtttgctaatgctatcaaacgaaaaaaggaaattgcagacttggaaagagtggattgtatggaaaaggctgtcattacggtggttcctcaagaaccaccgcagtatcaataaggcatccttagttggaattgccaaggactgaggaattcttggacaattcgacacttgagggaaatgaaaaagaaatatttccctgacattttgttcctcatggagaccatgaattctgacatgttcatattgaaagtctttaggtggttgggttatgattactttcatactattgaaccggatggaaagagtggtggtttagcaatattttggaaacatcaccttcatacagatttccttgttgaagacaaaaacttgctggatttggagatatctcaaggttgtaagagatggtttatctcttgtgtttatgataatccaagacagaggctaagacacttgctcctggataaaatcagtaacattggagtgaacagaacagctccttggtgcttgataggggattttaatgatattttgtctaataaggagaaaataggtggcccatctagagtggaatcttcctttcaggacttcaagaatatgatatcaaccagtgatatgcatgaattggggggcactggaaatagttttacttggggaggcaaaagaaatgaagaatggatccaatgtaaattagatcgctgttttggaaattcacagtggttttctttgtttcctaattctcatcaatggtttttggagaaacttggatcagatcacagaccggttttggtgaagtttgttaatgatcatgagcttttccgaggaactttcaggtttgataaaaggtatgctgaagaccctttataccaagctgctattcacaaagcatggataggtaatttttcttctcataatccttcttctatgcgccgtctggttgactgtaggtcatctattagtcactggaaaaaaggaaaggattataacgcaaagagtcgaattaaaaagttaagatttgatttggatgaagaaaagagttaccagtttccttgttggaataagatttctgttattcaaaatcagctgggtattgcttttagagaggaggaatctttttggaggttgaaaagcagggataaatggatgtctcgtggggataagaactctaagttttttcaggcctctgtaaaagctaatagagttaaaaattgcttgagttttcttgttgatgagaatggtattgagcagactctcaatagggaaaaaaggaaaatagcagaacagttctttgagaacctgttcacctaatcttatcctgcaaatatggatttagttttggaaggctttcaaacgagagttacagaggctatgaatgaagaccttactcagaaaattacagaacaggaaatctataatgcagtcttttccattaatgctgagagtgcgccaggtcctgatggtttcactgcggcttttttccagactcattggaatttggtcaagaatcaaattatggcagacattatggatttctttgacacaggtatccttcctgaagaatggaatcacactcatttatgtttgattccaaagattccaaatccagagagaatgagtgacataagacctatcagtttatgctcggttctttacaagattgtctccaaaatcttatcagctagattgaagaaacatctgcctgccatagtttcaccaactcaatctgcttttgtggctgagaggttagcttctgataacattcttctagctcatgagataatccataatttaagaaccaatgataagatttctagagaatttatgatgtttaaaacagacatgtctaaagcttatgatagagtagaatggccttttcttcaaggtattctaaaggctttgggtttcagtagccaatggataggttggttaatggctgtgtctcttctgtttcttattcagtactggttaatggtcaaccttatggtcatttcttaccacaaagaggtatcagacagggagatccgttatcaccgtttttgtttgtcatctgtactgaagcacttactcatatcttaaaccaagctgaacgatgtggaaaaatcactggaattcaatttaatgatgcagggccttcagttaatcatttattatttgctgatgatactttgatcatctgtaaagcaaaacaagaggagtgttctcagattatgcactgtttatcacaatatgagcatatttcaggccaaaagatcaatgtggaaaaatcttcagtcacctttggaaacaagattgaagcagaaacaaaatattggattatgcatagatctggaattgttgttgaaggaggtactggaaaatatcttggactaccagaatgtttcagtggatcgaaacaggttttgtttggctttcttaaagagaaactgacctctagactcactggttggtatgcaaaaacattatctcaaggtgggaaggaagtgttgttaaaatcaattgctatggcattcccagtttatgtcatgtcttgttttaaacttccaaagagtctatgttcaaaactaacttctatcatgatagatttctggtggaatatgttgcctgaaaaaaagaaaattcactggattggagctgaaaatttgatgctaccaaaaaatctggcaggctttagatttaaagatcttcagtgttttaatcaggctttgttagctaaacaagcgtggcgccttcttaatgatgaagacagtcttctttctcaggtcttcaaaagcagatattatctcaattcggatttcctcactgcgacaaaaggtactcgtccttcctatgcttggcagagtatcctttatggtcgagagttattgacaaaaggtctgaaaaagatcataggaaatggtgcaaaaaccttcgtgtggatagataattggctttttgagggtcagattagaagacctgagagtgttcatgtgatggtggatattactttaaaagtcagtcaactaatcgatctagtttcaaagaattggaatttgaacatgctcagagacttatttccatggaaagatgttcagataattcgtaatcaaagaccgatgctttcaaaggaggattcttattgttggtcaggcacaaatcatgggttatacatagttaaatcaggatatgacttgtgtagtagacagaatcataaagagatgtttcacaatgcacaagaactaccatctgtcaatcctattttccaaggtatttggagtctttatactgcactaaaaatcaaagtcttcttatggaaagcagttaaaggggctgtggcggtggaagacaggttaagaacaagaggaattctaataaatgatggatgttctatgtgtcctgatgagaatgagacaatacaccatatattgtttcaatgctctttggcccgccaggtatgggctctatccttgatgcagtcaccttcttctggatttggaaaatcgatttttactaatatgaaccaagtgcttcataactgtaagaatcaaagtatttctaagctcctaagatatgttagtccttggattatttggactctctggaaaaatagaaataaagttctctttgaaggtgaaatctctgtctctcatggcatagtacagaaagcatttgaagattgcaaccattggctatctgctcaagatccaaagactcaatctgaagattcaaaaattgaaataaattggatccctcctccgtggaatgaattgaaatgcaacattggtgtggcttggtcaagaaaatctcaactagctggtgtttcgtgggtagttagaaatgatacaggaaaattgctttttcacagtcgacgctcttattcacaggtacattctaactttgatgctaaactaaaaagctgggaataggctttagagagtatggataaactacatttagatagagttacttttggagcttcttctcatgatattatcaaagcaatgaataaaccaaaagaatggccagccttgagaggacatttggatgcattgctaaatctcactttggacaaaccgcattggtatatggcaatggaattaagacagtgtaacatgggagctaatgagatagcaaagagtgtgataacaggattgaggtggcaaagttatgttgctagaggacctcctcagtggttacattatctttttgactctgaattaattcagcagagatgaagatgaatgtcttcaatattggagtgtttttatgttgaagggataaagaataggattgactcatgagaaggaattcttatcagatagtcaacatcagaatgctgatttggtgattagcctcacttgggttttgtcttattctacatcacaacacgtttacttcagaggaagaaagaggaagttattgggaatgtttcagcatgatccatcagttactaagcgcccttttggtaaggaagtccgactgtttcagacatgactcagcaaaaaagctaatgacttagctctccagatttcttcattagtgacagatgttggtctcagaatcatgattaaaggaacgtggcctttgtttatgattgctattaaggaggttagttgttcaatcctatgggtgataggagattgggatgctttattttctttgtcttattcataagtcggttctttaagtcctattattcctaagtttataaatattgtctaattagctttatctaggttagtttttttttttaaattaacttagacgaagtttttttagtattttgttattttaatagagtctcagtcggttttgtctttctttatctctttatatacttttccttctcttcttagttattctatctcccatccctttagcttaggtagttttctctagtaacaatatggctgatgagttgtgggatgagattcaaaacctagaattaggacaagaggatccggcccttttcattccccatgaagcttatgtgatggtcgaagcttcaaataacctaagtctgatagctaggcctctgaatccaagagttcaaaatcttaactctgttgtggtagcacttccaagatcatggggactaacgactcaggtgcatggaagaattcttgatgcaacgtatgtccagttcctttttgcaaatgaaattgatctactgatggtgcaaagaagagaaccgtggcttttcaacaattggttcgttgcagcaactcgatggcaggtggctccagctcacaaccttgtcactaccattgatctctgggtgcaaattcgaggtattcccttaccttatgtttctgaagagacagttatggagatagctcacgatctaggagagatcatttcattggactttcatgaggctacctctcctcagattgcttttattagagttagagttcgttttggtataacggacagactgaggttttttcaaagagtcatctttgactctggtgaaactgcaaccatcaggttccaatatgaacgactccgaagactatgtagtagctgtttcagatttactcacaatcgagcttactgtccctaccgtcaacgtcctcttagcatcgcaagagaaagagccctcttctgtgatagtgttcaaagatcttcaatgaactcacaatctcagatgactgaaagctcctttccggtgcccttgactccacctccaagagtggatcctccaccagtgaatcacgctgaatttacagctgcctatcctcatcttgcaacagcaacaaacgagaatcacagggatgtaggagaatcaagcacctccagacaggatatgtcatcaggatcaaacaactttctggcaaggagaactactcacttcacagaccatcgaaggtgctttgaaggtggtcaagcatcaagacaaaatgaaaacagggaaccaagacgtcctactgaaaggatgaggtctccaactcattttgatcatgttcaacgctctggagggattctgaaacctccaaaaaaaacgctaaaccactcgatcgttttctgtcattttttgggaaagattgcaggactagaagcatcacagcttcaagacgaagaagcctgcttagtagggtatggtttttggttatgacatactctttctaatgttctgttttgttgtaatgcttcagtttgttttttctttacttcagcaatgttttttcattttcagtttgcctaagacttgtaagtggaaagtccactggttaaactttttgtaacttcacagtggaatttgaaatggaaggcaacttttcagtgaaaaaaaatagtaactactataatagcggtacagtttgtacagttgtaatagttatcaatcataaaagttttattaaaaatgttataaaaaattttattttaattttttttataacttttttgtacagcttcttttaacagttttgtactatttcaataaagctaacaactccaactaacagttagaaaacttatacagcttttatttaccaatcagaccctattttttaaagtttcaataatttttaaaaattctctttttctggacataggaccctttttctcatctagtgtttttcattaagattgagaagagagcttggtttagtgtctttcgttagaaatgtaacataggtgttgcaaatagaggagctgatcaatttattgtccaaagtgttaccatggattgtggactacaatcttatgtggtttctagttttccggcttatcctctttattgatgagagagtgttgttctcttcttgatgattatcgtgttgtgtttgtttgtgcttttgattagaaccatttatgtatatataggaccctagtggtatcctttatcccctcggtgttgatgctattctagcagagtctccatttgagactattttttggtggcttcactcaagtcatgttgtaatcctaatctaatcctatatcaatataatccaagttggcaaaaaaaataaaattaaaacattactggttgtataaacttaatatatggtattttatatactcactgatgcaaaaaaaaactaaatttttattttctatttggtatttatatatagaaaagaaaaagaaaaatacacacgtatttttttccctctttattctttcctcgctactttaatttattactccaccaattacatccaaaaagtaaattttggtatgttataccgatatttagaggataatcagtctctttggaaatgttttatcttcggtcatattattgatactgtcccacacgtcggaaaagtccatgccatcgcaaacaaactctttcaatgccaacaaaaaaaaaacgcatttcaagataacaagattgatgttcattttttttttaagtttcatcatagttgatctcttcaaggtgagacatgaagtgatgcgttaaataattttcgaaggaaaatagctttgttatcagaacatagattttgattattactagtcaaaggctcaaagtcattagttgatttaacattacatttaaaccggaaacacacaaatccaaagacttatttgagaacacactaatgtacggtacttcatggtactgtacggaagattagataagaaagaagtgacacacgacgatggatcaaagcttgaattatgcatgagaatgggtagatcagcaatgtctggtgcagaagcaacgacgacggaatccacggcagttacctccgacaaagccttcgttgtggcacacgttggcgcagtttgatgcactcacgcatgtacccttgaacctatggctctgcgactcacaagtgcgtgcctccacagtgactggtcccatccctagacaaaatcaaaacacaaaacgaacacttcgtttagaccatagcttagtttcatgtgtctcatgcttgatgcatattacttaactttcgaagtgaacttaactataattaaatgagcattcacaagaataatcgatagaaaccataaatacagaatgttataaaaaatgaaactatctatatatgttaaaatatgttatcataaaacatgggttatgtgtgaaaattagatattaggttatgagaaacaaaccagtggcgacgaatatcatgaacatgatgagaacagctgagatcaaacgcatagagagcttcattgcaagagagataaagagagagttcgaaagtagtgttcaagtgtgttgctgctagtgaggaaaatggcactatataaagagagtaaagaggtattaaaacgttcaagataattcacattttacgcgtttgttagatatttttggataaatatcatttactttatttttggagtattcactttggatttgaataagagtggtgtgagtttctcgattttatttgctttaccgacactttcataggtgtaaattgtggtccgtaacgtaaggtgacaagacacgcagatgttgtggagtccatctaccgtttcgagaagtcattcatgcaccaaattttgtatcagaaaaaaacaaataaacgtatagaaaagtaaataattgagtttgcggatgttgtggagtccacaatgataatggctatgtaaaaaaaaaactaaaaagtaacaacaagtggaatagtcacgggatagagtatttttatcatataccaaaatgaaaaagttagtgggttatataaaaattaaactttgtatttatatagcaagttaaaacgcaattgataataaatatcgaatacttttctaattattacttagataagtaatatttgggattagttactctaaattaagtagtataattgtggctatattttaaagaactgttatggcagacaaaaagctggttgctttctctttatcatgtgactttataagttatacacgattatcattttctcacttcacacaattcaacaagtttccggttggccttagttttcaggttcaattttaagtgtaaattgaccatgagaacaccttcaaaacgtgacttggcaatggcagttaccacaaagaatccaaacttagtatggctttgatttactagtgaattattttgtatagtcatattcaattatttaatcgcaataatataatcatgaatttgaacattttcatagatatttatcttcaaatgtagcaaaaaaaaaagactatctagaatttattccaagttatctagaatttttcagctaagaaaaacttatactatgtgacattcttgaaccaatcctaatagaactagttgttcattgttaggtttcggcaaagacaatgggaaaacaatctagtgagatttgtgtcttatacaactctgacgaataaagatacttgagacctttaatcattgcgtgaggttttcaattttgatacctacaaatacagctaagtcactcctttatacaatctttgatgatcgaagactaaactatcctgaaggttcacttcatttgatcactgatccacattttagtgtttggaacaattgtgacttttaggtctaaagaaggaaatttttgggttataatttacatgcgtagaagaaaatataactatcgtgatctattaaatttaagtctaataatagctagtggttacacatgtttagaataacacattaacttcgtttcttgactaattttacctcaaaacaaaaaaggtaacaataatgttatcccatgagaagagaagcaagaatctctcccatggttttctcaggcgtgtctccgttgtcatctacgtgaactccggactctagaaccgccgcatcaagaactagtttccgcttcgctatctcgtagatgttctcatcaaccgtcgatttcgtcaccagtctgcaccagcattgccagagttaatacagatatatgtgagaatacaaaacagagcacacataaaccaatccaaaccacaattttgttctgaaagttatctaaactgattcaaggatttaaagctcaaacctgaagatagtgactggttttgtttgaccaatacgatggcaacgatcttcagcttgccgatcaatctgtggattaaaatccatatcgtgaataatgactgtatccgctccggttaaattaagaccttgtccacctgctcgagttgacaagagacatgcgaatatcgacttatcgttgttgaatgtgtcgactatggtttgtctatctgtaacttgagtactgttgaaaacaaaaggaaaatgacttaagcttcttcctttttgtagaatcgtcaaaaatgtgacaaattactcttttttcttttattacctgccgtcaagtcttcggtatgtaacgccgatgacatcaagtgtccattctaagatatcgagcatcgatgtccattgactaaatattagaacacgatggccggatttcttcattgaagggagaagctcagctaatgtctgatacataaagggagatttagatcgctcacaggtttagttatacttaatcagtttcacaaagaagacttatgaaatgaagaagaatatcacgtacccgacattttgctgagagcatgacatgtttgtctgagagagttcctttggtatcgttaactccatattggaacaaaagctatggaaagaaacaagttagttagcttcttcaattgcataacatgtttgttaatggatattcaactgcttttggaaagagaaacatttacctggtggatacggaaatcgttgaaacccttaacttcctcgataactctatccaaggaacattcaaatccaaatgcaccgattgggtgcaatttcctggcgatgcgaatgacatcctcatcgctgtatatccgcctaattaacaatggatggtttgcaatctgtacaaccaaaatttaataacacatgaataacacactcatttggcacaaaaggggctttgtattagtagctgagaattaccttccggaattgagtaaaatagtttgaaatttgacgctttggaagtgccttggctaaagaattcaaggattttgatgaaagcttcacaagccgtgcttgagaagcagcacgatactcctctatggcttctttatatgcatcttcctgctttctctccattaatacatattcaacctgcattggattgatgggaaattaatgagatttgcagctagaagattaatatcgtgtacttaattgtgcatagatatatccatacccgctgtatcttcggaacaagttgctgcatgacatcagattttaaacgcctcaagatgaaaggacctaagatagatttcattcgagtaatcaactcagtatcttctgcattcaacaacttcttcaagtcaacattctctgtcgtaaatatatcaggcaacatgaactccaacagcgaccatagttcctgcatagaccaaacatatgcagggaataagcattgtatgaccacatgaagaaatgtcgtctatattaggtaattagatcctgaaaaaatcaacagaaaccaaccgtacatgcaaatcattttgtagaggcgttcctgtaagcataagacgctggtttgcgtttctggccacagacatcaagtttttccacctataactattcttatcctttaacgcatgggcttcatccatcaaaacacagctccagcgccaccgtttcagtacttttcggtcatctttctgttgttcactgtaaaattccaacatctgtgagtaacaggaaaagccaaaaagcaaataaaagcatcaagagttgcacctatgccgttcaaacagagagtaacacacaagaagcacattgaatggtggtggcttcccagcttttgacaaagaattcaattctcttgagtaggctgctctcgcagctccgtggtattgaagtacagtaaacgacggacaccattttctgagctctctctcccagttttccaagacagaggcagggcatacaaccaaatgaggaccagggtcattgtttaagcgacttaggagggttaaatatgtgattgcctaaggtaaatgagaacaaaattagttctttataagataaagaaacaaagaaaacttatccagtaataacagagcaaaatgcacctgaatggtctttccaagacccatctcatcggctaaaatggctacaaacaatagaaagtgagttacaaagtgacattcacgctaaaaaggtttacagatcgaaactagtaaaaacacatacctccttcaattcctttcttatacaacagaagaagaaagttaacaccaactaactggtacggcttgagtataggctgaaaatcagaatcctctgctttacatgcatcatcaatatcattctgcgatcatcacagattcaacccaaaagtaaacaagttttagttaacaaaacagtaaactctaaccaaaccaatcaaagcttaccaccaaaatatgctatctaatcaaaagttacttcacaattgtataaggaagacactctaaatcgtctcaaagcaactactttaagaacaccaaagtgataatttccagtacctgtgtgacaatcctgacagtagaagtttcaacttcagagtatctatcagtaacaccagaagaagtaccataaagctcttttcgaagatccgctgagattttagcacacttttgcaatgccttccccacaacatcttcatcttctcctctccttcctccacttcctcctcctcctcctccaaattcatcctcactagcactactctcagcctcatcatcatcatcatcactcgcttcttcatcttcaatcacaaatctcctaccaactctcgcagcgcgcatcacaaccttagtctcttccacttcttcttcatcctctaacaacaaatcctcaccattcacaatcttcacatccgaatccgaatctcccaaatcctcaatctcaacacaatcaccatcgctgctattactctcaatcgtcatcgccgtcgaaggtctcctaaacgcaaaagactcaatcgacggcgttggattcgtcgccgcgcgagtcttcttcggagtccgtggtcgtttaagaactcgcgaagcgttaaacgagtgttgagaccactcttcctcggagatttcgtcgaaatcgcgtttcatcttccgagaatttacgaatcccagattgaattgaaattgagaagaaggggaaaaaaaattcacatgaagaaaattgaaaaccctagattgagattgaagtgactattattgcatcgaattgaagaagaagaagaagatgaaattaaaacgaatttagcggagaaggaagggaaaggtcaagatttcaaagaaaggttagagactcaacaacgtgttgcttcttacaaaagagcggcatcctccaaaagctatgcgcgcggacttaatctcttaatgggccccaagaaatgggctctaatgagtacttaatggtgaacttaagggatccgaagaaatgggcccaacgacttcactttctcgacaaatctaaaagcttgtggtttgtttgacgcacttgaaaagggtttttaaatccatggggtttgcttgaagatttggttttgaaatgatggttgaggtgagaaattatttggttgacatgtattcataatgtggaagaatctgagagtgtgtttcgttggatggtggatactggataggagtcttataagctggatatgtacattgaggggtatggtaatagagctttggctacgtttggaatgttgcggtaaagataacctcgtcgttctcgatcttaatcctcattctacaggttattatcatttgtatatatatgtttactagctaatccattaactctgaaaattaatattaactctcggaatggcagaaacagagttgttattgagtttctctgaccttgccatcttggtgacggcagtttcaaatactaaatatttccatacaattttggttcatctaaaacaactgggtcttgggctgtttgtggtatatctctccttatataggctcttttgtgtgcgtgactgtgtgctatttcatattactaacttgaaatcatattacaacccaatcagggaggccctgattgaatatggcccggcactgacccattgcagttggtacgatctcagtataacttaaaaagcatcgatggtaatgaagagaggatcaagttgagaagtcacctgttacttaaatatgttgtcgtttgtaaactaaaataaaactaaattgtataagattaaaaagcccaagtgaaaaggagaaaatcaaactttacggtcgaataataatatatcaataatattttctcaaagctcttaaagtgatattggagattttgtgatatatcgttttaaaatctattcagatcggttgagagttggttactcgttcaggattaattaggtttgattcaaaaccaatcggttcgattgttttgcattgaacattctgaaaggttgaagaattgaaccaaagaagaaaagcaatatattaattttcatacaagaatctaacaaattttaaaaaattctctattgattggtgtatcatgtgtattaatatacgatatgttatattataaacgattttattagataaaaacaattaaaaaaaagttagtacaacaaaacctaatcaagttaaatgaagagaaaacgagggttttgtcttaaagctcaccagaaagatacgaatgagaaaaatgtggtacccacaacacacccccgcatgtggacacatttcaccgttttaacagtgacacccaaaccgtaaccatccttcttaattctgtcaaattaaattataagaaagaaaaaaagtagctttattttatattaatcgaaataaaataaaatgatagagacagagaggggaccttagagacatacttttcaagatcatttcatatatggcttatttttaaaagaagaagaacacaaaacagtagagagagaaagagatatagagatagagagagatagggctttgaggtttgtgtttgtattataatacataatatataggaatagtgtcttcttcttcatcatcatcttctatctcatcatcatcatcatgcatcatcttcttcttggttctttctttagctccgatttatagcttttaattttgactattttttttccttcttctacttggtttctttctcttgatctcaggtacaagaaaaatacaacttagaaatctttcctcttaattctttcaaaagtttaggaacaaaaaacaaaagtataaactcttaatttgtttttctttgtttatgtcttctagtgaaatggtttttataaaatttcttcatgtcgtcaatctctatggatttttcctgttcttataattcctcccttcgttttcttcttaacttttttgtcttacgaattatttgtagattattctcttccacgcaaagaagaagatctaaagatgtcgtcatcatcatataacacaagcgttattccttcatcatcatcctctgctcagcctttcttcatcaccagctccggcaccggagataacgactttaaccggaaagatacttttatgtcaatgattcaacaacctaactcctcagctccaccacccaagaaacgaagaaaccaacccggaaacccaagcaagtatctcttacatataaatctctatatatttatcacctttctataagaatcactatatataagctttaagataataccaagaagaaaaagaaccctaatcatttgttctattttgttttgtatatctagctagtatcaagatttcatatatattgacaggccagtatatcttatatgtttatacgtgtatatgtcatttgatttatgtttacatgtgtgtgtatcatttttttcgatatagtctacatagattgacattttgggtctaattggtgacttaatttaaatgattaaattctttaattatatgaaacagatcctgatgcggaagtggtagcattatctccaaagacactaatggctacaaacagattcatatgcgatgtatgtaacaaagggtttcaaagagaacaaaatctacagcttcaccgaagaggacacaatctcccatggaagctgaaacaaaaatcaaccaaagaagtgaagaggaaagtgtatctttgtccggagccaacgtgcgttcaccatgacccgtcacgtgctctcggagacctcaccggaatcaagaagcattattaccgtaaacatggcgaaaagaagtggaaatgtgagaaatgttctaagcgttacgctgttcaatcagattggaaagctcactctaagacttgtggtactaaagagtatcgatgtgactgtggtaccatcttctctaggtaactaatctctatccatttcatttaaataatttgttcgtatttgatttaagtgatgaaacgtataatatatgtgtcagtgtgtgtggcatctagatataccttcttatcttggtaaagtataacaattaatggaccacctttattttgtattataatgcaaaactattctaagtaaaagctgcattcaacactgcatgtaaaacttagcttatttactaatttacatggaaaataccaaatatatataaccatctgtgactgaaatattgtatatttggccacggaatttgaacctcgagtacaccgcctataaattgtatgtagtcacaatgtacataggatctatcaatgtatttgtttggttgttgatgagtagtgaatagagaaagacagtgaatagaaagtaagaaaatttaaaagatgctaaatttggtcacatactcacatgcatgagttggattttgtttttctattttctacttttgttttcttcttcttcactttgcaggttcccctttttacgaaactcctcttcatttgtggaccctcttcttatctctttctctctctatgtatgtttatatatacgtacatagatacatacatatttggtaagagtgcgttacttatatttattacagtgttctggtgaacactttaatgctcttctagggtttctttctatattttcatggtttgagtaatatacgttgttgcagaatgtgactgacttatattaacattcatgggttttgcattaaatgaagaaggtctttcactaaattagcaattgactcgacctctatattcttctttcattctctcctttaaatggtagccacaataactatagcatttattgattatgactcacggaataaatatagtataaagttttcatatatatgaattaataactttattatcgaccgttgtgttatttacatttctttttgttttgctttgtagacgtgatagttacatcacgcatagggctttctgcgatgcattgatacaagagactgcaagaaaccctaccgtgagctttacgtcaatgacagctgctagtagtggtgtcggctccggcggaatctacgggagacttggcggtggcagtgctctctcacaccaccatttgagtgaccatccaaattttggatttaaccctctcgtgggttacaatctgaacattgcatcttctgataataggagagactttattccgcaatcatcaaaccctaacttcctaatccaaagcgcttcgagccaaggaatgttgaatacaacgccaaacaacaataaccagagtttcatgaaccagcatggtctgatacagtttgatccagtcgacaacatcaacctcaagagtagcggcaccaacaacagcttcttcaacctcggattctttcaagaaaacacgaagaactcagagacgagtcttccttctctatatagcaccgacgttcttgttcatcaccgtgaagaaaacttgaacgcgggttctaacgtgtcagccacggcactacttcagaaagctacacaaatgggttcagtcacaagcaacgacccatctgctttgttcagaggcttagcttcttcgtctaactcatcaagtgttatcgctaatcactttggtggaggacgaattatggagaatgataataatggaaaccttcaaggtctaatgaactcattagccgccgttaatggaggtggcggatccggtggcagtatcttcgacgttcaatttggagacaatggaaatatgagcggctcggacaagttaacgttagattttcttggagttggaggaatggtgagaaatgtaaatcgcggtggtggtggtggtggtcgcggcagtgctcgtggcggagtttctttggatggtgaggcgaagtttcctgagcaaaattatccatttggaagaggttgataatatcttattattgtataacttaattaggtgataattttgttatcttcgcttgttgttttcataatcactatataataatagtatatctttagtgagagctttttaggtttggatttggttagagtctgtcttttatataataaaaaagattgtaagtttgctagctattgtactgacttacaactccaatatgattttatgtggtgttgtttataaccgagagaatgataaatattatggtttcgaatgaagagggtggaactaaacgaagtggataaagaacgaagaaatggggttgaatggttaaaaaatagtagaaacttgggattacacatctcagtttaggaagaatacacacaaatctgaccataggcaatctatgctgtgtttttaaaaacaaccctctcaacgggatgtttcaacatgatgtgaggttaaatccatgttttggttcacttaaagcatattttaacatgtctagttgttccaataactacctggaatattttatcgtttgtaactatccaaatactaaaaaatccaaaggaatgtctctgtctattgttctgaaccgtcatgcttcggttgacaccataatatgaagtccatgttctcatataccgatgttgatgggatagaaacactcccaaaatcgaaggtacagcagatcattgtgattaatcgtctccgatcccgctctggtccgtaacgggacagaagatatcatagttacatcccacaatctcttaatctaaaatttactaccatataatctaaaatggtgttccaacaaaagtgttttaagtttcgaaagctagctctctaatttttcatgtttgaatattcagataaatcaaattcggctttccaccgagactaaatgaatctgatatgattagaggacatgttaacaaatatattctgatcataaaccactaataattgatcataaaccatcaagattaatctattttaaaaccctgaacttactttttaatagaaaaacccctcaactaaaaaattttaatgaaaaaatctctcatttaatagtcggtccatataaaactctacctaaactattaatgaaaataacatttaagtacaaaattataataaaaaaacccttcatttataattctaagatcgtgtaaccgtcatgcttatattttattttaaatagatttagtttctaattttttacatgaatttgtttattttcattgttttacgcaatatataatgcgatgggcataattggcaagtgctttagagtctttacaaagaaaaaaaaaatctaaagctttgaaatagaaccaatcaagttttagaagatttgactttttctcacattcaaaatatttacatgatttattttttttgctatagaaaacctctctttctaaagcacaattttttagtctttctaaaattttaaattctatagccaaaatacctacaatcatatttctacatcaaaaaatgcaaagcaaccactattaccaatctgacccgatatcttaattatattaattcatcgtttttgttttgcattctattgtatcacgacgttttaatgctattttaaaacaatttatgtctaaaaaactatacacatctttgaaatactcaaaatttaataatatttctttgataacggtcatttaggattgtgacaatactatagacgaatgagtttttttggctaagagatatttacttatggagtctaatatatatccgtaaataattgtgggtttgtgttgttaataatttagaagttttaaatagactgattagtacttaaaggtttttgtcatttaaatctcttagttaaggctttttcattattaatatagttgaaggtataaaatggatctaccgatacttgagggttcttttcattaaaatccctataaaatatatgtctaaatatttttttattttaatttatttatgtgtaaactaatgaaatattttatatttcaattgtttaataacttatagatgttactaatagttccatcaattaattagcttcaaaaagtacataatactcatttaaattatttatttataatcaatacaaaattataatttaatcagttacaataattgatatcattatgaatttgtgcatgtgacatcaattttaaatctatatcagtttgcatcacttttacaatattgatataactatatgaattatatcatttagaaaataatacaaaatttaaatcaataatgacctatgttaattaaaaattaaaaaatcaattataaaaagtgaatataaaaagtatatgaagcaaaaaatataacataatataatttatttagtatctatcgttgctatgttaccacccaaattcaaactagttattatttgttgagggagatattttttgtttggaactatattttgttttggtcatatgtgattaaaaaagtttatatatttaaaatatatgtataaggaacgactaaaatataactaggattaattagatgggtctaatctgttcaagtggtaccgtaaccgtatactatatgatgtccggtatttaaaataattgaatttattatttgaaaataaaaaatcgtgcttttctcgctacatgtattatgaacgaaaataaaacatccacttgaatattttaattgtatagtatatgtatatatgcatacgtaccatgtcatagatactaaatttaattcataaaactagattacacatcccacgttgctcatgcaaatacgatatatatatatatatgagcatatttgaagacaataatacgccaatcgtatcggatatattccaatacgaagcatagtccaaacacaagcatccaacatcttcatattatctaatatcatgttgtaattgaatattcatatacataataactaaataattatactctatatctagctagatatattgattgtgagtgaagatacatagcgaatgtcaaaatcaaagaaatatttatgttgtataataacaagttggagcaaagagaagggaattgatttttccttactgatattttaatatattgattttttcacatttttggatagataaaattcaatccatagccaatctttactatataacacgatttaatggaatcaaaatttggtgaaaaatggggagtcaaatacatattgcatatgcatttagtatgttgacttattcctactggttttgcaaaatattttggcttttatattgcatattagtttagtagatagaatgccaatttcttaaataaattcagtataatacatcaaatattaatcgaagttttgaagtatcatatcgaaaagaagaaaccaaatttcaaaagtagtacttgcattggttaaccaatgttacttcaatatatttagattgatcatatgatatatatatttgtattgataattaagttttcataataaaagtaatttacatttgtttctatttttaattatggtttttccttttctgttgtatttttttgtattatttctagttttatacttccaaaaagttttgattaaataataatgcatataaatatatatgtactacgtttccgaaaaattatttatgaactgtgtttaaatatatatatatatatatatatatatataaatgtatgtgtgtgtataaagaatatatatttctcgaacaaaaagtttggatgtttttttaaagttttgaactcgtattttgaggataggcaattttgaaaagtagataaacatgtgcctagttaaaaaccgtgataatactaagatattagggtaatacgtagcggtacatttttacactaaagttagaggttgatctcaaaatgatttgagaatatcttccataaaattatatatgttaataggatggtgctacagcctacatgctcttttgaaaactcaatgttcaagattttgtgggagctagctcattggagtatttgagcagtttatcccctctttcaaaccccctccatgtatatgttgccgaattggggtttttagtatgatctttctgtttgctatgagtttggtttaggtccggtttctacacaaattgatgtaggtcatctaataattcttcagcttttggatacgtagcaagtagcaaggttttccacaaaatatgaataactgatgaaagtaatatgttgttcttcctatagaaagattgatgaaaccaatgtagagctaattctgcatgcttgatatgggacccttttcacatatctacaaacctctcaagtaagatgctaaggtgttgatgcggtcatcttttcgtaaagtttaacaaacatgtacaatttcttgggggtatccatgtatatctcataagagagagttgttttgtgagtctcttgtagctttgtcgataggtgcaagcatcgttggcaggagatgaacatgactttcaactcggctaggctttttgttaacactagctagctaaggaaaaatgctgttgacactccgaagacataccataaatcgtttcttttcgtcattatcgttactttcccaactttgactatctctacacctactcaatttcacatgtcccgatccaaaatatatataacatgacgtacaccaccggatcatattaactattaaaatctgtaaaattggaatgtttatcatgttgttatatgtttagagtgacaacgaaaatattaatagtgtagattagtatatatacacagaacaaaaaaagtatatatatatgcccgaaatctaccactacatcaccatttcttgatggtctattctaggtggtagtaatatataaagttataaacactaaagatgacatgtaatatgtaacaaagcgataaaaaaaaaatagttaaacggttttcttttataaattaaaataaatacaatgtgtctcgatcgaaatttgtttaaatacgatattaataagaaaccaattgaatcaggttcacgaagtggtacgtaccgagaagaggataatgcagaggtatttctgatccgagatccataaaatctatgtttggaaaattgtccaaagaatatcaaagaagactatgtttttgcaaatatataagatacacatctaaaaaataatctttaatgaaattgaacttcaaagaagacaatgttaagttttaaaatatatgtctaacaataaaaagttggtatacaaggttttttttactggttactcatactttcttttgagtatatgtaggattgatcaaacttaagacatggtcatatccacagtcgctagggcaaccaacactggactctcgacctgcttctgtccaaagttttagtcttcatgatttaaaatattatctctttattttatattataatgatctaatatatcaataaattttaaaaagaaattaatttgggaaaaactttaaaataagtcaatttgtttgtcctttaatattcaattttttatatatttttttaatcctttgctttttatttgataaggcaaattagttttgttgagttatatctctcatatttgttttttaacttaacaattgagtaaaacacgaatcaatttgaatgttttgaaggatatctcagattttcggcatatatatatatatatatatatatatatatatatatatatatgcttgtttgcactcaatttttttctttgcttatttcgtgctccatttttctttgtaatagaatgaaacaagataaatatattggaactccaaatttgatataataaaaatacttagcggtagaaaatggactaagaattaacactaacaactataactgtaagtcaatttgattatattttattttttacttgaacatgtaaataaacccgtataaatttcaaattctatataaaaaaatatatgtggaaaattttaatgagaatttagaatattttattataaactttcaattaaccaaaatttctagtagcattataaacaactgatctcacttgataaatactcttttggttcatactagtctttaattaccaaaaggaaaaaagaaacaattccaaatccatatgatagatcttgaagctctttgtgtgtgtttttctctagtggggtatgctccgtatggagttccaaccattagaaaataatacaggggttatgtttctcagggagattcttcaatagtaaaagaaagaaacaataatcaagtttgtgaatcggagagattatatatatatataaagttgttatgtggatttatattaattgaaatggataagaaaaataaaagggtaaagcatgtgaatgacagagttgtcgttcatgtgaaagatagaaaaaaaaatggcccgtgaagagattgtcgagaaaagtttatgaatactacaaaaattcttgagatttcttctgcttgttcttggtccacttcattatgggaaatctttaattgggccatacaataactattaattagtagatgcattgataatatgcttatatattccatttgaatcaatcacaaatttggatccattggcatataactttaacatctatcaaaaggaagtgtatagtaagaagactaatgaaatctgtttttttttttagtatattcagttggtgaaggtataaaatcgataaatcagaaggtgatttaagaaattaagtgaaaataatgaatatatatattttttttaagaatttgaagttataaatttgattattactcgttcgaaacaacacttttcagtataaaaattattttgattggtttacaataccgagacatatgtcttaaacggtcatttaataatgagatttaacacaatattccctatgtttttttaaattagttttttagaaaaatacacctattaaaaaaaaaattaaaaatataaaaattatattaaaaataatgtattaatttttgtgatttatatttttctataattttaaaccaatgatattcaattatttatcttgaagtttaaaattcattaataactaggttttaacccgcaatttaccgcgggcaatcggtttatttggttcttatactaaatatttgaataaatttgatatcctaaacttataaatataaatttttagtgattagtgaagaatcgtaatatatgatttgtatattatttttgttgaacggtttagattaaaagggaattaattttattgaacggtttagattcaatcggatcatataaagtttaggagattgttaagaccaaattatccttaatgattttaaatagcaaagaacaaaatctaaaattaaaatcaaaattgaggccaaattagacaaaatttcaatttgtacttcccttttaataataaagggataactaataaatagtgtatagagaacctaaaaaaataattttttaaaacaattttttttctaaaaaatcaattaatttcaaaaatatacatgctctttgtaaagagttttgcacaagcttactacaaacaaaacattcagattcatgaataaaacatccaattggtaaattgacgaaaaaaattaaaataaccaattggtaaatgtgcattagtttacaaaagatagaattgaacgataaaatataacaaatttacgcttttaattttaaagcagggtgtcgttgatggtaaaaatctactttctctacatggattatttaaccaagaaaaaaataggttataagcaaaacaattttagaacagaaaaagaaacaggggaaattaagaagatgagagaagagctgtctgtttttggtgagacaacgatataatctctccctctcgtttcatgtcgatgggcctccttacttccatcacttgcatgtatgtccctacattatatatacgaaatttaactattattgttattccccttataaattattacgacaaagacattatattaccattattaatatcgttatttcaacaattgtagatgttgtcactcacaatagtgtaatgatatgttcacatacgcacaccaatagaataaatctctaacaaaaaaaatatctaaaactagctaaaaatccaagaaaatatcaaccatcatacaccgaaatatcaaaatacttgaatgaagttctattaaatcatttgaatagttatatttgtaagagacaatacaatatccaatctaaaaaaaatagtaacaacaaaatttaaaaactaaaactgtaattcttatgtattctaatatatacacgattccatacaaaaatcgaaattgtaccttagatgcagtttcaattgatgctacaacttttaaccgcaaattagcatcaataatgaagacgcgtgaatgttgagacagaattgtttattttggaccgtcaaatttaaaatatgatggggacaatcctttgaggatatggtaggaacatgttacatacagaactatacaaatgcataaatatatgcacatgtgacacctatgtgacatgtatatgtatacatgtatcgagatatttagaaaggagatcacaggacaaacactcgtgacattgccagctagtgaagatgacaaatgaaaagaaattaaagaataaaaaggcaaataaaagaaaatgaaaacaaaaagacaaataaaaacttagcaaaggctgcttgtactctccaactcattgactgccccatgcaatgataagacgataaatgtgtcagccaaaaacaaatataaaaaaacatttttttcctatcaaaaacaattattcacacccaaattttttatagttaaacccgttagtataatgttgtttttagcctttgaccctataagaaataatacatacaagaacaaagactaagcattgactctaaaactataagccagaaatatattgaatttcttaaagtatctaatatgtcacaaggcaagaagaaaaaaatctacggataataatatgaaaatttcttcattgtgaaaccataaactataactctgaaatttgtttttttcaggagggaatccattttatataaacaatgaaaggcaaaatcttttacaaaagaaaaaaaaaaaagaactgagtttagataaattgcaactaaaattttaattacttcaaatggggttttgatgacgacatgcatacctgaaagatatagcatgtactttgatgaactaaaaaccttttttaaaatttctccttagaaacttcttttatcttcttagaaactcgcatgatggattccataaggtggtgaagtacttgccggaccacctccggtattcacattcatgctgcttctatcagcggaatccgacgacgagccaactctttctctactatttccatgttgttgttgttgttgttgctgctgttgctgttgttgctgttgttgaaaccctccgcttccactcatgctttttacgatctgtccaactccaagaaagtctctagtcatgctctgtttgtcagcgcttaatcctttgttcactcctccgtacgaaccaaaaggagaatcaactccgttaacgtttcccgttgcgccggggttagagaaagaattcatcaaatcctgaagattactctcattttctccgtagattccactcccaaagcttcttaggatcgatgaggcattgttattgttgttggtgttgcttccgttgttgttgttgcttgaggttgaacccatttgagcagctttctgtagaagggcagtggctgacatgtgaggtgctgaatttggactttgcattgatgagctaaagagtgaagggactgatcctgagctaattctatctgccgagctcatcagattgttagggaagagaccagtgcttccttctcctcctcctccaacagcattttcgccatcataatggtttgatatcataagattaccagaagaaacagcagcagcggcggcagcattagggttacttgtggcagaagtaactccgttgtttccggagaggaagctgagattgaagacattggagggagcagaattatggttatcatgtgagaactgcatcagattctgttgaaaactcattggtgattgcttgatgttattgttcccagccaaaaacccttgttgatgatgatgatgatgatcttgttgatcatgaaagctagggttttgctcttgcatgaagtagcctgaagcattcgcagcaatgagatcagaagaagagcgtgaagcggctcctcctcctcctcctccgcttccaagacggagaacgtcaccgggctggtgatcaagattctgtggggcccccatgtgggacagaccaaggatcatgcttgaagcgttgttgttggagttgtttgtgttttgtccgtacgggaagtgatgacttggcaaagaagtcaatgaagttgggtgtctcgcactctcttgagccaacgcgtcacagaaagctctatgtgtgatgaaactgtctcgcctgtgacacaaaataaaataaataaaaatcaatttcacaatggaatctattggatcgtcagatatatctctatactattcatataaaatgatgaaataaaagacatattttgggaaaagtgaaagaaaaaaaatataaatgtaagtagagagagagactcatcatgtcacgtagctacaaatagattcgcgtgtaattatgggatcttgaaaagtagatagatggctagaaagtcactctactactctattatacatcatattattattcacctgtgtaaactcttaacaagcttacacactcacatgtttgatgcatacaataaaattgcacgcatacacataaataggagtacaatgttgtgtcacatttcaactatgatgatgtatttgtctatatgactatgtgtacgaacaaatctaactcttatcaatatcagtttatgcaataataataaacataaacattattaatcaactccggaaaactattatgcttaattcactataatttatgtatgaaactatgaatatagctatctatataataaattaatgtggtattcaacgaattccaaaggtaggtggaaaaagttaagtttcacactaatgtatagagaatgattgtcaaatgaatatctgagtttgtcctaattcaagatcttgtatgttcaataaatgcaagttgagcatgtattcaatgaactacttatatttttatttaagaaaactagctacttatatatatttgcagcaccacatatttatttacttcattctatttatagaactcctctaaatgcacgcacacacacaaacacagcaatgccagccaagactgagaaaaaaactctatattcgaaataattatttagtctattagttatcacgtctatgcaaatttatgccattttatgcaaaatgtgtagagtagtgaaccaaactaatatgtggctatggtacagagtacaaacgaatcatatgaaataattgtattttcgtaaaattttacacataagagaacaaacactgtaacaacaacctccctagatattatatagtttagcagcacgtgaattgcccatatagtataagtataatttcatatccaagaaaaaaaaatcctgagaaaaatatattaatttatttttatgacagaaaatagggcggtgtttccaaggcaaaagaatatttaaaaaaaaaactgaaattgaaattggtcctctttggttttgagtttctgctagaaagcatctattgaaatatggcagtttcagtgtcatctatagatatagttatatagacacacacacacattcacgtgtgttcttgtatcatttttttttataaaaaaaaaaagaaaaaaaaaactaaagttgcatttactgcacgaaagaaagcgataagagcatcgaagacttcgaggcgaaacagaaagtgaacctaaaaaaaaccctaattcatgaagaatgactcacagacacatattcacacacatatcactatagcagctcaatagattaaattataatttaaagagtttgaaagatttggattactaaccgagagaagagtgtaccacagtcacaacgatactctttggtaccacaagtcttggagtgagctttccaatccgattgaacagcgtaacgcttagagcatttatcgcatttccacttcttttcaccgtgtttacggtaataatgtttcttgattccggtgaggtctccgagagcacgtgacgggtcatggtggacgcacgagggctccggacaaagatacacttttctcttcacttctttggtcgatttctgtttgagcttccatggaagattgtgtcctcttcggtgaagttgtagattctgttctctttgaaaccctttgttgcatacttcacatatgaatctgtttgtagccattagtgtctttggagataaagctatcacttccgcatcggaatctaatcaagaggaaaattattaactaaattttaaaagtcttatattgcatggaagataaattgattgaaatctgaattttgaaaaaccaactacaagctagggtttgctaatttgcttatttcaagattttaaaaaatgtaaaagggagaagaaaaaaaaggacatggaaaagggatttatctttttcaccaatcaataagttcttttaagaaatgatcacatgattataaaagatttgaattaagaggtaattaacttacttggagttcttggttggtttctcttctttttctgcggtggagcttcaagcggtggcagcggtgcctggtggtgaggaggtggaggaggaggagcagcggcggaggaattaggtgggaggaggtgagattggtcatcttgtcggactccaaagaaggaagcagcggaggatgaagaagcagccatggattcttctgtgttctatgtgatggtgagagagagaaagaagaaaaagaaaaaaaaaaagagaaatgaaatgaaattagagagaagaaactctttaacattaaattcttttttgacttccactgatatcttatctcaataaagccctaaaattgggatattccagatttttaattaattggttatactttttttaatagatataaaattattaaaaaaacatagaaattcttgtgaggtaatagaagagagaagttgaaagtgacaggtgaaaaagagtgtaggctagtaaaaagaaagaagaaatataagtcaccacccaatgttatagcctagagtgttaaaagttcatattcggttaaaaaaatagggtaagataatcaaactgaatttaaatctagcttggttagtttggtatagctctaatttcatatgtatgatacatatgatactaaaaactctatacatttatttgtaaaattttatataatttttcttttgtttgtaacgcatttaaataagaatatttatataattttggtgtcgcctgtagacactaacacatatacagagctattaattatttttgatatcattttttctaaatatgtaattaattttagaaaaaaaagaaactatgagagctacagaggtcggtggacccaatccatttgccacaaaacgacagtggatggtgcgtgagacaaccctcaacagctcctctctctcgctaacatatgtgaataataaatttcaagtttttttttttttggatctaaaagggtttagaaaacaattaccatagtgtaatatgactttagaaattgtagaagaagatatttgacactaacataaaatatctatacgagattgctcttacaagaaaagtttagcatcacgatctaagctatataaaaacataatttttttggttttatatatcttaaagaaatgaaatggttttttccttaaaaagaaatgaaaatgttggaatttgtgtgtatgtaacatttaactaattttaaatgtttgaccatataatatctcataagaaaaatacgtaaccgaagaaggaataaaaatataatattttgagtttgaaataaattagcggttgtaaaactaagcgactatgttttcatataattttacaattttaataacacataaatataaatttaaaactataaactataaactaaataaatctcataaaattgtattctaaagctaatgttttcatatatatagggacagatttcttgaattttcaaaagttaatccacaaagcatcttatgtttttcttaaattgtcaaaataattatttgtctcaatcgtcatcatcatctcatatgggtctctcttttttggttttaaaaagttcctatcatatcatacatacacacatatatatatgtctgtctgtgtgtcatggaagattgaatgtgaaaagaaatattccaaagataaaagaagacaaaaagaagaatgattgtatatatttttcatgtatatggtaaagtaaaaaccaaaaaggatactccaattttttaactatatttcgtcgtctcttcccatattcaagcaattagttaggaactatttaaataaatctatgaataatttcccaaatgatagatcccgtcatctttttttttatccatttaaaatatcaaaaacaactatatagtatatatctatgtatatactttagtgactattgaaaatcagtcatgttctccaatgaaggagatcaagaaaatcaacccatttttgtatgggtcttcgttaacgtgagcatgagttatatataaaacttgtttagcataagacaatagaaaacaaatacgatgtgattgtttttatatgatggataattagttttgttatgctaaattttttgaggaaaggaatataatttgccattcccgataacaatgacacttgaaccatatcctttcctctcacatacatattcgaatagaaaatttctttcaaatcaacagtaagtaatatataaatatagatatataaacagagccatatttaaaataaaagataggaaaaagaacttcacctcttttagcttgtcgtttgaggtcaatttttgaagtaaatttctatgagcttcttgcttctaagtatgaagtagagggccatatatatatatatatatatatatataaatatatatacatacatagtaaacatatacatagatgggttaagaataaatttaggtgttatttaggcagttttgcaaaatcattaactactttaattaattactttcaaagaaagtaaattattgactaattgtataactggacaaaaggtgttagacttaattaccatttataaattaaattactttaaaataataataaaataattagttattttagtatttaccagtttaacctccaagtgtgagaacaaaagaaaatgaaaaaaaatcacagaataagtcccttaatttggtccaatcaattcgtttactttttaaatctaactcttaattttggcttgttaacaaatcaaccatttcatatatacaccatgtaaatatcagttccaatgacaattttcctaatagattttagcaaattttgaaaagatatatagccaatgtagtaagatatcaaatgcaatcatatataggtcaatcaaatgattagataatatatccataagatatcaaaatttttattaaccactttaaaccaataatttttactataattttccaattgtttttgatgctaattgtatatatatatttttaaacaaataagagtactagactacataaattttaataagcataggggtttcttatttatttttaaaagtggtggttgtaaaatgactcaaattaaaaaactaaggaattttaaaaataaaataataaaaaatcaatatttgtcaattataagttacttttaaaaaatttctccataatgactgttgaatttttttattgactaataaatattagtctacgtgtatgtcatggcgaggttataaatcttttatagctatctgaaatacagttatgaatttgtttgtgtgtaagtcattgagattttataaatctcttatatttattttaagtataactaacatttgtttgaatactaaaatattttaaaaatagtatatttattagtttaactaaagcaaataattgcagaatttttgaagtgattgatatcattaaaaataaaatatatatcatgaaatattaaaagatggtgcatatatttttgaatttagtaaagagtaataaacatataaaaattttcgattttttgaatttttgaaacgtatttgaatttttgaagtgattgattttaacaacaatatcatgaaaagatgcttaaaaattgacaatttattatatcattaaaaattctatattttagagtgtttgaagtgaaaaactttatgaataaatggtcactagattttaatccgcggtataccgcggaacgatttattttttaaaagtaatatatattaaaacttgcaaattttatttttataaaatatttatagtttacagtttataattgttattaactaacactataccacgaattcatgagacaattgttaaaaaactgaagtttttaacccctattaaaacaacatattaataatattttaaaattttataaatattgattcaaatacatccaccatataacccaattccaaaataaaacacgttctgtaatttctttacccgtcccgtgatttttttttaaagtagtaatttttaaaatttaagaattatttttcatatataaaagttttgcaaattgtatcattctctaatacatttatattttatagtttaattttatatatagtaacattatacataccacataacatttttggttttatataatcttttctaaattaggatgatttgatatgtttaatattagtggtcttaaaaaataataaattaaagatttaacccgtattgaaacggtggattaattatattttacttttttattaatgttgattcaaaaacccgtccctccaaatccgtcttgccaaaaaactatttattttattaatattaattttattaataatataactctgaattataatctaaacattttagctaataacataagagtgcaccatatttatttaataagggaatgtaccatatgacccgaatgcacttttatccaaatccaccaaaaaaatcttgcaaaaataatatagagctaagaaaagatagtcggttttgatagatataagattagcaaatatattagttagcttaaattagttaaagaatacaaattgaaaaggtatattacactttattggaatatagtattaaaacttatataacacagagatttgataaaattttaattgttgaatactttttttttgtgctaatttttatgtgattaagatttaattgatttcgtatataaaatattaaattgacttatttgtttataatttggtaacatgtagatatttgaatatttagtatattttgcttcagtttaggaaatctttgatgacccgtctttagatcaaataagctctataatctaaatattaacctgcagtataccgcatgtaggcttatattttagttaaactaaaaacttttattgtaaagatgattaaaaaatatatgatattattttatttgattttaaatgtatagtaaactgtgagttgtatatgttttgttgatattatctatattgtttagtgtttaagattatacgcttgtagtttgattgttaatttaagagtttcacctgtagtataccatcttgtattaatatcgatctaaacccgtcaattctaggattttccagtttgtattaaaaattgaatcacatctaatatgttattaattatttgtagtatatataaattataaattttcaatataatatgtatgaaattgaatataaatttttcaaattatgacccgttactcagtagaaagttttcttaaatttttttttcaccgttataatattttttcatgtatggaacagtttatatttgtttttaaaaattcaaattatggcatatgcgaaaaaactctaattatttttttataatgatgatattatttttccgcaaaaatagaatcatataaagatgagaagtgaactataataattaataaaaaattaatatgataatttagatatcaaacataatttattgattttaactggttacttttttggaaattaataatgtattttgtttttctaattaaattaaattaattaaaatttagatatcaaatcttatatgttgattttgattggttattatttttggaaattaataatatatttcgttttttaattaaatttaattaattaaattagtatttgactttttaatccttaaagagataaattaatttactctttaaaattttatttctaatggcatacctatataattacttacaaaaattaaggttacatttaaaatgtacttcccaaataatatcgtaggattagtaagtaactatcagtatcatatttatcaaaagaacatacctttttttttgtggtatgcgatatgcataacaaatcacaacatttacgaccactttagaataatgtattgattgccgcgacgagactaggcccacataaaaagaatgggtgaatggaggcccgtgaactagattaacccatgcataataactaagtgatattagaattgaatcgagtcaagtgtgaggcgtatgaggtcagacaccattcatgaactacaacaagaacattgtactaagtgagagaactagtcattagtgttatgtatatctctttaagaatgattgatgattctacagttttaatcttctatatttctatttcttcgtgtgaaaaaaaatctcaaaccagtttctctatatacaatgttaacaccacacacttcactgtgtagattctcctggtggttcactctcttcttcatccttagaatcaacaggcctaagtgaatcaagactgcaaaaacaaaaacgtcattgatcctctctaacaatctcaaagataataaaaatgacaaaacaagaacctgcaattctgtgggacgctccaggtgaaaccagaggattggttactatgaagtggtaaagacttgaaatctctccagtcttgaagcatgattctaagatcatgaagcttactatccaaaccaaagcagcaattcgcatgcattgtacaaacaagattcaaatctttgcttggttcacagaatccaccaaaatacactgtgttcaagaacctaatcctaatccttagtttccaaaggaaaggatctgtcttgatgaagtttagaacatcctggtcgtggtttttggggtacttggtccttgaatcataccagaacttgtagaagcctatacttcggttattggctctcacaaaggtaaatcctccatttggtctattcctaaaatcattcggccttcctatgtaatggtcacaagcaatctggaaatcaccgtcttcgtaaaaccgtcgaaaagggttcctgaaccacatcacatcagcatcctagagaacaaagacaatagatcactcaatagaacaaccaaccaacaagttcttttcaagagtgaaagagagacttataccgtgaaaacaaagttgtaacccttttcaagaacagagcgaaggaaagagattcgtctccacatcattgtcaagtaagaaggagtcatgaaataagcttcaccaccagagaaatcaacaccttctgtttcaagtctgaagcaatgcttatgcagttcttgacaacgtgaataagctttagcatccaaagcaatgatcaccaagtgtttcaatagccttcttgttcctttaccaattctaaaactctcaaagaaaagatcaatcacagatcctggagccgcccaagcttcattcaaagttgtcaaaatcactgtaccatctttagttgctgctctacgcaatacttcttctagcttaggttcctcaatttcctcctaagaaaccaaaaccagaatcagaatcaaaatcgaaccaatttcaatttcgattaccaaatcaaatccctagaatcgaagtctaatgaagtcgaagatcggatttatgaataaacaccaaatatatagaaacaatgtggaagaagaagaatactcaccggagacagagacggagatggagacggagacgaagaagaatcgttgacagaggggaaaatgcgagagagggtggaggaagagtcagagacgattcggagataaccagaagttctgtagagggagaagcagaagcagatgaagaagagcaagagaacggctcggagtacattgccggagcacggtgggattacgacggaagttacggcggcggcggcggaggaagaatgattctcgtcggagtaagaatcgttgagtatcgccgtcttggaattggagccaaaacggttcgatagattcatcttcgccgacgttgacgacgttggtcatcgtctgggcggttataaggtagtttcaagttttttgaatgtaaaacgcggcgtttaatgagtttaccctccaacgatgaaacgcagcgtttaatgggttttatctgcgagattattttttctaccgtaggattgccgaccaaaataacaatgaacattctaaaccgtaggatcttgatatagaaacgctgcgtttaggggttatccttcaaagatcaaaacactgcgtttggctctgtttgttaattttccgttcaaaggcgatcaaaacgctgcgttgataatttatctaaacttcattttctaggtttctctactaacattcaatatcctagtttcaaaaacacatccgaatagtttctctgaacctaaatcttgcataacttatttagctaccgaggagagaaattgacagattaagatcaatctttgaagaaccaaagcaatctttggatacgaatggtgctgaacaagtcgagactgctgcttcactcgtttcgctcaccaccgatgatccattgcttctccaatgatgatgatttaacgacagagacaacgacaaatcttcttcttcttcttcgtgttcttgttcccgccactcctctgttccctaatgaaccaaaagacaaaattagttaccaaaccggactaaaaccggttaaatgccatttatatgaaactaattagattcaatgacaagtagtacttaaaccggactcaatccctttggatttgaccagtctcaatcagaccggttagaactcataaccggacttgattttgttttgcaacattaaatttccaaaccggttgacaaaagagaaatttatttataccttggggaaatgatgtgacaaaaacgtcgtcgtatcgttcatcttcttgatgtgaagaaagtcagcatcatcatcataaccaccagactctgaagtctgctgctcttttgttcttcctcctcctcctcctctgcaccaaagtaaaaggacaattcaaatacagacaaacaaaaaagcaaaacactttttttttttttttactgaaataaaattaaaaaactttgtcagaaaacaattataaataaaaataaatacctaaatgaagaatgtgaagaaagaggaaaagagtgaaaacccaaaagacaatcattccttgtgtgtaaagacaagttgtcatgaagataataatcttcttcactgtcttgtcttcttcttattgaagatgatgagctttcttctgtgtaagaaacaataaaaactagttaatgaatattctcttattttctgttctattactcttgaaaaatatataaatgtatttatgacatttgtcttatgaatcatgacactagaccaatagtacatactacaaacagatacagtaaaataattaaattccatccattattatgtgtttgatgttaacagttcaaattaaaatcaacggtcccattctttttccaaatatcatcattgattcatttcataattataaggaaaaaaataatacctggtttctccaaagtgagctttgaacctcctctatacatctgtttatatatatgttcaaaacaatcaaaacaaggtgttatgaatgaaatatgaataaagaagaaaacaaaattgatgtttttggtaaaattaattactatttacctgaaggtggcttttgacatgtgaaatggtaagtcccttcacatccatcatcttaagaacaagttttggtgttgctcctgtttcatcaaacccaacaaaatatcaaaaaggtgactatgatgattctttatgaaaaaaaacaaaaactcaaactttatgaatgaaacaaaacaacaaaagcgtgaaggttttgactcggtaacttgacaaagatgattcattacgatgatgaagataaacaacacaataaggaaacttcaaaccttttttttagcataaaaatccaaactttgaagataagaatgaaacaaagtaacaaaagtgtgaagattttattcaaaaactgattttttacgatgattgagacaaaagaatgagaaaagtccaatttttctagttatatcgtaactttaggatgtttgaagcaaacaaacacacaaaagtttggtttttttcacaaaagatttgaagagaaaaaaagtataataaacttacggtgttgaccaccgagaatctcgacggcgtgaacgaaacaacggtgaagatccggcgtccatctaagccgtggaactggagaccgtacgtaaggtctaactccgtgaaatttattgccgttaaagcttccgttaccatttctaccactagacttacccatatcgtttcaagaaccctaaaaaccgacacaaagattcgatttttacttaaacccaagagaaaaaaaggtttgatatgttttggttctgtgaagaggagagaaagagaaacgaggagaggaggatttgagaggtgtgtgggttgggattaaaagagcaagtttttgtttttggcttctttcttaaagatgactgtctctttttccatctattctttttgtctctttttggattcattcatacttattattatctctctatatatgttttgcaaaattccaaaaaataattattaaaacttgagaaatgtttcattcattttttttgttaaatatcaatttgagttcttacgaaaaaactacattaattaaaagagagttataattttgttgtttaagaattgttcatgacatatacgtgaggaatttgaggatacgtaaactatcgtaaagtcaaaatttcataatctgatatggtttatggttgggtcacttatttagacgattaaactagcaaataaaaagaatgatgttataaaattggtttattatactaaacagagaggtgacatgtgttttttgacctacaagcttgtagtaatcatacgaaaatccatttgactttggttacaaaagtagtaatcatacgaaaatccatttgactttggttacattagtcttgactcgtgaccccattcattattatcttaaataatttttttaaatagttttcgagagaatcattgcatatcaacgtaccagagaactacacaaggctacatacataacttgcatgaaaagaacatagattcgagtattacccttgccccgatcgatatataaccaattgaacatacatttgttagcttagctggtcaaaagaatatacttgtcatagaaaaaccaaattttgtaagaacacataatatttaccttatagggatttgggatttacccaaatgaagaagtttcctccacagtacctcaaactttactttctcacttttttcacgataggttttagaccaaaacgaataaatttaaatgaaaatagcccaactgcttagctttgaccatatagcataattattattcctatttttgttttttgttttgtttttttagggtttcgtgttaaactttctgatttcaaataaatcacacaattttacaatggtccttcgttatgtcttttggaccaccgttttgacttcattcccctaattcctttacattttctcccatttcccattcattttccttcttattgttttctttttcactcccataataagtgataataaatcttaggataatatttataacaagaattatttattttccccatttttctttttctcattgctgatttggtgtacatggaagacgaaccaaaaccatcatgtccctatatggtagccgacaataattactgatttcgccagttttttccaaccatggattcaatattttaatcaacgaattgtggacataaatcacgttattttatcagctattctactattaactacttatattaacatcaaatactgtttttaaatgatgtatgtatttcttgtaagaaattaagtactagtatataatttttatgtagtattagaaagtaattgatttgtactacatacttactcgtggtttacgtggtatcagccataataataaaaaaataagaaaaagccgattgagtattaattaagagaacaaaatttaataatttataatttaacaaagtcgtcgtctttattccacacataaatcagacatttctatacccaacgaaaaaaacaatcaaataataaaatctacacacaaagtgaggtcattgacctttaaaatgtagcctattgtgctttgcattttcttctcatttatgcacattctctaaattattataaaaacgtggaattctctgcatatatgccaaaattcgctttaacgattttaaaaatggtttagtgtttgattagacggtaattaaaatataatattcagtcaccagcttgtcaaagacacacgagttgcttatattacctatatattgactagaagaataatacaaaaagctacctaggttatgatcattgatcaaaataatcaagtaaacacattccaaaaggttttatcagtgaaacaattttactatattcactaataaagccttttattatcctactgatgatcattgatcgataaacacaattgcatggatggataaaatgtctaaccgagagttcaagtctcaaaaatcaaaatggttagtactaatacatgtatgagagaaagtggaagcaaatgaaaataatacattaaatgagtctggcagagacaaatagctccaagagaaattgaatgagtaattgactgtggaggtccatgattcatggcttttaccacaatcaaaacattcaataattctctttgcttgtttttttattaatattataaaactttgtacatacatgtaagataatgtaacccaactggattttggactataaaaaacataacattcttttttgtgtgtggaaaatttggatgtgcaaatctcaccgaaccattcgacgattatcaatgttaatttattattctattgggtcaattttctcatcacccattgattgaattc

SEQ ID NO: 154 - DNA, 74903 bp, Arabidopsis thaliana
aagcttgcccgtattccggaggaatgtaacctaaagttccaaccaaatcagtacttacatgcgtctcgtaaggactcatcagccttgcgagtccgaaatccgctaaatgagagttgaaattctcgtcgagaagaatattactcgatttaatatcgcggtgtaagatatgaggatcacacccttcatgcaagtaaagtaacccttttgcagcaccttgagcgattctaagacgtgttttccacttcaacaacgctggaccgtcgttacgctcgtgtagccaatagtctaagcttccgttttccatatacgagtagattaaaagccggtcgtttttgtagaaacagaatcctcggagaagaacaagatttggatgctgtgctcttgagagtgtttcaacttctgcttcgaattctctttcgatttgaccgcaatcaccggataacttcttgatcgcaactttcttaccgtctggtaacgttgctttgtaaaccataccaaacccgccacagccaatgatgttagcttgatcaaaactatttgttgagtccaaaaggtcatcataagagagctctttatcattgctctgaaacaaaaccacaagcttagatccaatctctccgagttctttacgattcatgctctcggattcttctatctccggatcaacttctcctgaccgtctacgagcacgcaacacaatcaacgagagaagagtcaaaagaaaaaccgaaccaaacgctatcccaatcgccattccaatgtcacctcctctgcttcttcttgaccgtttgatcaatgcactctcagtaccttcagaacaggggaatctgtgttccccgcagagatggttactctcaaagctcgagtttggaaacgtctgaaactgaccaccggaaggtattactcccgagagattgttataagcaacactgaacttcgacagaaacgagagctgttgcagagaaaccgggatcgaacccgaaagacggttattagagagatcaagagcttccaagctcgtcataccagaaagcgagctaggtattgatccagataatgcattccatttcaaatcaaacacatgaagcttcttcagattaccaaactcctcccaaataggtccagagagattgttatgaccaagctcaatcgttggcgggaacccgaaaatctgattgtattgcaacgctctcgcgctctcgtttcttttcataaagaacgggaaatcaggagatggctcattgactgagatattacggctagtgagactctctaacttagttaagctcttagggatctctcctgtaaacgagttgttagataaatccaagtagaacagagccttgaagtcaccaatccagctcgggatagcgccggttaaacggttccaagaaagatccaacaactgaagttcattactcgagcttaaccacctcggcatcgaaccagtaagcctacaattcgccactacaagcaccttaagcttctcgaaatgaagacttgaatcatcgggtaaagcctctccatggaaattcaatgtaagaaccaaagtcgtcaagttcttgcaatgctgaagtatcccaagcgctgaagagatattagccaaactcgaattcgataacgagaagtaagataagctctcgaagttcttgaaactctctggtacttgtccatggaaggtgttcctcgcgaggttaacgttctttaaccgcttgcaatccggtagattctcaggtaacctcccattgaatctattggtacctaaatcaagagagttcaaagcaatcatcgccgtacaattcaacatcaaacgacccgataaagaattgttcctcaagttaagcagattcaaactcggtgaattcgccaacgatttaggtattcctccaatgaatccattggtctgacctaagaaaaactttaactgaggcaattcgtcgaacacatcagggatttcaccggaaaacaaattccaagaaacatcaagacgaacaagacttgagagattcctaatctcacgactcaacgaaccagagagacgattctcttgaatccctaaaagattcaatcttttgagatgaaacaaatcctcagggatgttaccagtaagatcgttcataccaagacagagatgctcaagcaagacacatttcccaaacccggaagtgaagtttccggcgaagtagttcaccgcaagtttcacaaccctaatttgagtagagttatggcagatatgagacggaagcgacccattgaatttatttgaagaaagatcaaaactttgcagagctgggagatttatacttgttgggattccgccggagagatcattagagctcaaatcaagagtttgtagattcttcaagttgaaaatcgaaagagggatcgaatctttgatgaagtttcgagagagattaagaaccctaatctcatctagcttcccgagagattcagacaacttccccgacagctttttgttcccaagctccaatctaataactcttccggtgttgtttgaattgcaggtgattccggtccagttgcagcagtctgtagaagaagaagaattgatccaaccatctggttttggttcgagatgtgctatgaagtcacgtaaggcttcgaggtcatgtggatggcacctggaggtggtctgagattccgaggaatagaagaaacatagtaactctgtgaggaagatgacgatcacacaaaaacgatgaacacgcatttcaagaacagaggaagaagaagaagaatataaaggaagaaactttgagagaagaattaagattcaacaaaaacccttgagaaatctgagagtatacgaaacgggttttctgattattgccattttagatgatgatcaatgaagatgaagaagcaagagagagaaaaatggcgacttttgacttcaacacgcaacagcaagtagtgggtgttgttttaatgcaagcaaaattctagagagagatagaaagtggaagagttgtgtttggtcttttttctgatacagagcaaacagtaaaaatctttaaataaagaagaagaagaaataagaagctttgaataaatattatttttccaaatattttgtgaattaatttgtgtttttggaaaatttgttatagacaaatcttttccgtgttttgtcaattataattgagtgtgtttagtcatatatgaagtcttaatcaataacattgacttaggaaagtctttctctaaatattttttttatttttttgtctaaatcttttactttgaatagtttgtcgttcaacggataggcagaagaaaatttggaacgattaatgaataatgaatgatgaaagtgatcgaatttagaaaaatatatgcaaaattatgtgactataaatgtttctttatggttttttgccgattattctgcaaatggtagatttatattttagtagtttctatgcaataaaaaggtaaaggagtagcttttattaattatattgattttattttgcaaatggttaatttttatattaaaatttgattatgggttaattgaataataattaaagatgaccggagaagaagggagtgaccggttaggtcagctttgaggatttaagatgaggacaagagaaaagatagaagtcaaagcacggacgttgacacctttgcatctctctctcttctcaactacaatttttttttttttctatttacattaattattgacattgtttctcttttttcgcaagttgataatgaatgaaaatagacctactagatattctttagtttccgataaaagcttcggaaaaaaatcttgagttttttccataaaatcttgaaatacttcaaagaggaaggttatcaacttaattgttgtatttgttggttaaaagaatctaatataggagctatttttttttagctatttacatgtccaaatcaatacgttataattccaatcaaattactaatattaatttcatatgaccggacttgtataacttgaagtttataatatcactatacaataacttgacttctaatttagaagtataactataaaagtgtaacgtatgtgagttgtagacgataaaaaaataaaagaacggttatatataaactattttatattttatataaaagaaactaaaaaatagtcggtataggaacataaatttcattgcttttttcttcagtttttttatcaccaattttcattgctaaaggattattttttgtcgttaatacttttttcttttaaaaacgacaaatttaggatgcgttaatattacttttatatgtaacgctatcctaaattttgtcgatagaatccgttattaattaattggaaagaatcgaaaaaaaaaaattaatcttggcagttaaaaaatggattctcttatacctttgtagtaatatacacgttatagattgttcgaaaaaaagaaaaggataatagattgtcattttaacaaaataaaaccaaaaagtctcacattttcttgccatgatttatttcttaaagaaaaataggctgtttacacaactttctttgatggtttacttgatttataagtaaatgaggacaatatgggtgaatggtgaattgaacatagacataaaagactatattgcttaataaactaattagcctacattcaaagttggtttaccatataagaaatcacttatatagttttcctagtgtgtgcatgatctttcataaagagattaaatattgttttacgtggaaaagttaagatacgattccatgttaataataaaatattaatgtcgatatctataatgaaggagacagtcaaagcatgtgacatcgactattcaactctataattaatcttcaataccatgtggctcgtaatggcttcgatataatcggctttcgttagtcttttataggttctttttttcttctgaaaattgacttactaagttttatagtttattatagctaattttgatatatatgatattacaaatagtgtgactttgattggtaataaactaataatactcttgctggttgttgctaacatacaacgattttttttggtaaaaaagtataaattagaatgtaaataaagatgactgatatttaccctttctaatattttcctacctttcccgtatgtctctaaaactcctaaaatatactacgatcctaactactaaatttataggaaaaatacccaaaatagaaaaaaactttgtagtttgacccaaaaaaacattgcagtttaaatagaaaaacgaaacaaatgtgaaagataatatttgaaaatgaaataaaaaaatgctcttgctttgttacacaacacaattcacaatctttcagagtttaaaagctcaactatttctattcactaaaaacccaaggttgttgttttcgtaatgtgtgcaacaaagcccatagtatagtttttcttaaaagccttcgaagttagattagaactgacccagttttacttgcttgggtttgttgtattcacatcacaaaaagccttgatcttttctgttttctcaacaaatcaaaataaccatatacactttgttcacaaatcacaagagatcattcagctacacgatgtcttctttttccaggcgtgatctagaagatggtagttactaggtaggaatataaacgttttagacatttaactgagcgaatgtgtgaatcatggacaaatggtttcagctacagggcatgactaagcaaaagagtgttgaaccaagactcaagatgacatgtatggatgtggaaacaggaaacagaagaaagatagtcacaatggtgaaatgaatgggaaacataagaatcatgaaccatctttcttcttgctattcagacattagtacacaagatagagaattatcaacttctctgctatttcatatcaagaactccaaactgtaagtaaactcgagacattagaagacatgtttttaaaactgtgtttcatacttcaaaatacacaatttgatcaaaatcagttgcttctttcaggcctgatctcaattccctgaataatcaaaccactcttccaatttccattctgagtctccattatactaatctcaatctcatcactaccatcatcaccacaacctccattgttaatgtaaaactttccaagctccacttcactccacccatctactctctcctttggccccaccacattcataccacgctccctttctccttcaacttcttcttcttcttctctctgaacctgcatccacggacgcctcatcctaaacgctctagaaaccatcgcatacgaaatccccgagtaatgggaagtagcgctccgtgaatccgcattaccggattcaaaatacactgacttcttggtagctactttccccacaaaaccaactccagcttccacaggtacgagatcaaacccatatgatctaccatttgctgtcttgaacactacgtaaaccgagtaatgagtcccttttgataacattccacaacttatctttccccgaacctcaaaccaacacacattacgcaactccgctactttctcaaacctgaattcacatatagacaagattaagtaaacaaactccaattgcacaaaatcagaaacagagtagtaagaacaaaaaagatgagatctttacttagattcaggaactgtaatccatttccaataagcaggagaatctccccaaatgatcgtcaattccatcgctgataacatataacacttcttcccactagctttctccacccaaaagctctgattttttcacaaaaatcaacacacaaaatcagataattatacgattataaacaaaaccctagtttcacattctcgaatcagattcaaattcgttacctttttgccattttcaaccaaaacagagttatcagcgagagataaaaagatctcctttttcgataaatgattcgctgattgaagaacaagagacgagtactccgacggaagaaacatctcccaaaccaaatccgattgcgccgcagatttcaccgatttcgaaaccgaagccacaacacaagcgtcccgaggactcgtatgtgaaatcaccttcgagatacaatcttccggcaatgcatcgaaacgcgacgctctcgtcacagaaatctcatcgttccggctacttcctcctcctccgccgccggaattcgaatcgccgccgtgaatttgttccattgttttcgaatctgaattttggaatcgtatcttatgaaacggtgtgttttgttatgtagtgagcgtggcaatgaagtggatatttatatccttcgtgattcgcgaaagacttagaggttaagattttaatgtgatatatcgataatacccttataagtgttaacgttttttgatgatagaatctcaaaagttttgcctttatctaatcaggcaaagcaagtgacttttgttacgtgtttaacttacctatgaagtctttgttacgcgacttgtgacgagatattcttctataaattatatatagaattatattccaaagtcaataacaattctatgtctttatcaagaccaagtacatgtaaatagatttagacttttagtcatgtaacattctatttctatagatttttctcaacactcctaagtaaagtcatacaaaagcatttttagatgataagaagaatataaaacacaaggatccaaaaaaactacttctatattacttcttctttctaagtaaaagtctacaaaagcattgtagatgataatataagaaaatttgttggagttttctcatttgagaatgatgacaataacactacaatccaaaaaaaaccgatcaaataacccaagttcacaaaacattacaatccaaaacataaaacaattcatgttacaatacaacaaagtttctcacttgcttagatatagaagtgatgaagcacaacatataccaaaatcatcgaaaccgggtagtactactttactggcttttcgtagggcggaattcgattccttgaatgatcaaaccactcttccaagaaggggacttaatctcaataacactaaactcaatttcatcacacctttcttcattgaagaattcaccaagctcagcttccatccacccatcttctctttgatctggttttgttacatctctcgtttccctccttccccttcgatccctaggccctatgaaatatatgaatcttttagaagattcttgtcccactaaaccaagtccaacttctaccggcaaatgccctaatccaggacatcgatctttcgtcttgaacacaatgtaagccgagtaacgagttccaggagatagcacacgagcgcttgtcttgccacgaatctcaaaccaacacacatcaagaagctctgctattttgttgaatctttataacaacaatgtgtgcaaatcatcatattgccaattccaaggatttaaagagggggaaaaaagagttacctagattcaggaattgaaatccattgccaatattcaggactacttccccatgtgatccaaagttcctttgaagataacatgatacacctttttccactcgctttttctaaccaaaagctctttgatttttcggaaaataaaataaaacatcaaaataatcagaattacaactacaccaaaaatgttctatcgtagcaagaatcaattttcttaaattaggtttttaacaaatctatgcgaaaactcgttgatttaacacatgattttcaatttgatcattgttctccaacgtataaaccaaagaatagatagaatcatataaatacctttttgccatcttcgattagaacaggattgtggcagagagcgaaataaagttccttcttcgatgcaaaaactcgagatcgagaaaccaaagattcatactccggtggaagaaacttgtcccatacgcaatcggaactaacagctgattcaaaggttttggaaaccgatgcagcaacgcacgcatctcgtggacttgtgaaagagattatgttggagatgcaatcctccggcaagacatcaaaaggtgacgtccccggagaaacgatctctccaccgctatgatattgccccatcatcgatcggtgcctttgatcaaatcgtttgtgtttcgaaaacttgataaactcgtgagttctgactctttcaaaactcgcttctgttgtaatagaggaaataatagacgtgtaatgttgtccacacatatttacaagactaccttacattacacgcttcatgttttcagtgttggttggtttttgcacttttttggttatgaaaatttccaaaataaccgactacgataaatttattatttcagcaaaaatagaacatgtaaatgattttatgatgaaaatgtcaatgtgataatacaagagagaataactaaagttgttacatacaattgaaatataagtccattcattacgaatatgatttttgttaagtaatggagcatgatctaagaaacggtgaataaagcgtggaaactaggcagatattttatatccgtcagtgatcgttacaggatataatgtaattttccgatcctagccttgtaaaatgaatcgtcttcagagaatctcaaaaggttttttcaaaaaaaagttttgcctttatttaatcacccaaatcaaataattgtttcgtgtttaacttacctctgaagtctttgttacataataataaattatattagtcagaaaaagtcaataatttataaatttagtgagtctttgtttaaaatcagatcatgtaaataacagctcaccaaaaaaaagattatggaagtaacaaatatattcattgttttttttgaacaaatttaatttgttattctatctctattgtttttggctaaatggtaaccgaaccgcacagtgcagtgcgtttcaaataataacgaaattctttgcatatatatgtatgtatatatttttgttactatttgaactgtaccgcactttattcgcagttgaaccgcacgtctccattcggagtctaagtaatctgtgcaaaagcattgtagatgatatgaaaacaaaaaaagacaattcctttattgaaatatgttcatgtgagaatgatgaacatccaaatcaaacagtgcaatatccaaaaattaaaaacaggtagtgttacccatacaacaaagtttttcacttgcttatataatgaacatccaaatcaaacacagtgcaatatccaaaaactaaaaacaggtagtgttacccatacaacaaagtttttcacttgattatatatagaacaggcttttggtgggacggaattcgattccttgaatgatcaaaccgcgcttccaataaggagtcttaatctcaagaatacttgtgtcaacaacatcacaacctgactcattgaagaattgaccaagctcagcttccatccaaccatcttttcttttagttggtctcgttacatctctcgtttctctgtctctcctttgatccgaaggcccaacaaagtatatgtgtctttgagaagattcttgtcccaccaatccaacagtagcttctactggcacatcccccaaattaggacatccattctttgtcttgaacacaatgtaagccgagtaacgggttccaggagatagttctttagtattcattccccctcggacctcaaaccaacacacattgagcagctctggtacttcttcaaacctgcatgagtgcatcatcataatcatcaccatgagaatgagtgattatgcaatcgaaatgaatgaccaaaaaagaagttctacctagcttcaggaatcgaaatccatcgccaatactgaggagtactaacccatgtgatccacatagatttcttcggagataacatgaaacactttttcccattctctttctctaaccagaagctcttttatttttggaaaataaaagaaataattcaaaaaataaaaaatcaaaacaatcataaatatttcaatagatgcatgaaatgtataacttgacaactacaccaaaattgtatcaataaagcaatatgtataaaaaccgatgtaatatatatacctttccgccatcttcgactagaacaggattgtcgcatatagcgaaatagagctccttcttcgatgagaaaactcgagatggaggaactagagatgaataatccgatggaagaaacttgtcccatacgctatcggaattaacagccgattcaaaggttttcgaaaccgaagctgcaacgcaagcgtcacgaggactcgtgaaagagatgatgttggagatgcaatcctccggtaagttatcgaacagtgacggtccggagatgatagctcctccgctagattcaactctatgtttttgcaccatcgacgaagaaccgggaacttttcggcctttgcctctagagtcaacgctttgtttgtgtcccattgttgattgtatcatctttcttcatttggaaactcagaatttaaagaaatcttctaaagtcggcctatgttgttaaaaaatagaaaatgactcgtttatagtcgtccacacatatttacgaaactacccttattcgcatcattgccctgccgcgtgcgtccttacacgttcacgcaacgctgcctgttttttaactgactattggtttattttttcagaaagcaaattttactcttgggtttggttttttcttattaacaatggtctacaaaatctgagaactttactaagaccagttgatgtacagacacgttcatgtacataaatttattcatatgttatcctgtctctatagtttttgctaagtaaagtgtacaaaagcattgtagatgattaaaacacgttttgatttatttattgtaatgtgttcatgtgtgtgaatgatttgcataaaaatcatacattaaaaatatcttaagaactaaaataagttagtgttagtttttcacttgcttaacgtgattttccgataattgcatttttttttttttttgaatagaatgttaaattatactcaaaagaaaaaaataacgttgttacaactcgtgcatcgggtaatttataaagagaaggttaaaaacagtttgaaaaattgatctaaatatcaagagcggctgtggagccacgcttggaaacatgcttcgtatctattatccttttgcctttgaattgtggtgatttggttcctgacttgtatgtcgatccattgaattatttagcctgcagtattcggtgtttcgccatgtctccttctgtttctctccctccaaatggtgtatgcagtggcttgaaggatgtatttggtgaggaagctctcgattcgacaacgcttgtgctgcgtagcataggtgatgatttgggaccagttgtttgagtggtttgtgttgaagacgcctttggcaagagctgtccagacttccgatgtgtagctgcatgaaaaaaaaaggtggtctcgagtttcaatgccttggcgacaaaaggtgcagtcacctgtttctcctcggttccacttgatcatgcgggctccagtggcgaggcggtcgtgtgctgcaagccataagcagaaagagtactttggtgtagcatgtgggaaccaaactcccttgtgccaggctacctcgtttgatgttgtccggagataaagtctttggtggagaatttatctttgtagatgtcattcttccctttccataagacacgatcctgctgctgcgttctcttttgatgttgagtggacaacacttcttcaatcgtgtttaagatctcttgccgatgatgtcgtcttcgacgagaagtccatgcatccgctacagacattgtgcgactaatccacatgtcaatggtgcctcttatccctgcaacatcaataagtcgacccaaaagcgaccagtcatcaaaccaaaaggaagtactttcaccatttcccacctcagccttacaaaaacgttttgcaacccctctgtatttgagaattttcttccatatccaagatcctagatttgcattctctttgacagtccaaaaaatctcgcgctttaacaagttgtgttctacccatttgacccataacgaatcaccatgagatataattctccagatcagtttcaaacaacaaacatcatttgcttctttcaaactccggaggccaagacctccctctgtttttggcttgcaaacttggttccaagaaatttttgccttttttgaattcaaatttgttcctgaccaaaggaaacttgagcagagcttctctatttcttggatacacgcacgcggaagtcggaaagcacttaaccagaaattacaagtactccagatgattgaactgatcaagttaaagcgtcctgcaaaagagagaaatcgagatgaccatgaccctaagtgtaacgtcttgaaaaaatatcaaaaggttttcaatttcacatagaaaggtttttgccttttagtaatcaactaaactgaattgcaaagaccagaccaataaaacataattttattcattgttattctagttctattgtttttggccaagtaaagtgaacgaaagcattttagacatatgataagaaaatcaaacacaatttctttattaaaatattttcatgtgagaatgatgaaaatcaaaatcaaacattacaataaaaaaaccttaagatatttacaatacaatttttttttttcacttgcttatacattaaactgaagcaaccaaacatataccagaatcatcgaaaccaagtatcagtttacatgctttttcgtagggcggaattcgataccttgaatgaccaaaccacttttccaataagaattctcatcaataacacttacttcaacatcaccacaacttgtttcattgaagaactcaccaagctcagcttccatccatttatcttctcttttctctggtctcgttacatattctctctcatacttaagatccgtaggcccaacaaagcgtacgaatcttggaaaaggttctagtgtcactccgggatatagatcatttgtcttgaacacaatgtaaactgagtaacgagttctaggagataggtatttagtactcaatctaccacaaacctcaaaccaagagtcgtagagaagctctggtacttcttcaaacctgcatgcaacattttttcccatcttcatcgtcatcatcaacagaacgagtgaatacaacacaatctagctagctaatggataaagggagtacctagcttcagaaatcgaagtccatcgtcaaaactgaggactattaacccatgagatcaccattccctttggtgataacatgatacacttttctccactcgttttgtctaaccagaagctctttgattttcggaaaaaggaagatatataactcaacatacttacaaaatattgaattgatgcatgaaattagaacttcacaatcacaccattgcttgatgaagccaatttgatgacgtggagatgaaatgaagtataaacatatgaattgaaacaatccgttgctatccaatcatatatcaaggaacccattagactttttccttagagataggactataggagtaacttccacgtttaccatttttcgtttaatttgtcaatttaagaaagtgaaataacaaggaataaaacatagctaattatctacaaaattgatgttgtcttaagatttttgattgggacctaatattgctccattgtatcaagaattatagaatattgtaaaataaggttttgcattagatccttgtaattgccataattatctaacaaaactcgatgatccaacccaaaaaattaaattgaacctaagattaatcaatattctccaatagtattaacacatggaacttttttcttatgatacatatatacatacctttttgccaccttcaattagaagaggaacacggcagagagagaaacagagctccttcttcgacaagaaaactcgcgactcgggaaccagagaggaataatccagcggaagaaacttctcccatacgctatcggattggactgccgattcaaaggctttcgaaaccgaagcagcaaaacacgcatcccgtggagtagtaaaagagattatattggagatgcaattctccggcaagccatcaaacggtgacggcctgggaacgatctctccttgcgccattggtgcctttttcaaattgtgacctaatagtctctttctagtttctaaggtggcctatatatacattcaagggtcttttcttttatgtgttcaacgttcacgcggcaagtgttttaactaaattacttgttgttttaagttttaaaaaaccctagtatattactcttggctttggtttgcaaattgaacatatgttaaataaatggtcaatcatataaaaaaggtctataaaatagacaattggctctctttttattttttaaaatagtcacatgataagattatagttttggatggacatgtgcatcatctcctccagcacaggtatagagcaggacgtgtctatgatgaatgacatatatataatttaatcagttgtatcaccaccaacagtattcaacggtttgttttaaccatattgttattaagaataattggatttgaaaactatactaggatatataatttctttcaggaaaatggtcaatcatatttaaaaaaagtaggtttataaaataggcaattggctctcttttaaaagtagttataataagattttatttctagaattctaatgaatgaatgacatttatatagtttaatcagttttatcaccaccaacagaaaccattattcaacggcctgttttaaccatattattattccctaattaaccatttacagcatcgcaatgcgaaacctaaaaatcatcaaaactattgtaggttctccctctctttttagtttttttttttgaaattgtccatatgtggaaatagaatagtccttattctctcttttaattgatttttctcatgagagaatcttaaaacctcaaaatctaaaatctaaaatcacaaaagttacaataaaacaaaaattatattcatgtttttagtacttgcttaagatggaagattgatacaaacaacagaacaatcaaagctcccttccatggtactacattatgggcttttcgtagggcggatatcaattccttgaatgatcaaaccacacttccaataagcataatcaatatcgataacactcaacacaatttcatcacaatccaataatcctcctccttcagcgaagaattccccaaactctgtcgccatccacccatcttccccctcctcaagttttattaagtgggtgattggtttgtctgtaaatgtagatttattgctgtagaatttttgctataagtgtgatgattgtagttgtaggttttattactgtagaaattaggttgtagattttattaatataatattattatttaaagaaaatggttgtagaaataatatttcagttgtatgtatttttaaacaaaaaacaatattggtaaattatacttatgtattatataatagaattcacaaatatcaatttaatttatatatatatatatatattaaaaaaacaatatgagttatatatatgtcataaagtagatatttacctactaattttatccataaaactaaatttaatatatatatatatatatatatgaaaattatagtaatgttttttaaaaaaatgaaaaaataaaatgaaaagaaaaagagaaaaaggtaaagaccttcttaagaccataaaattgtgttttgtaaaaacttgtacttactaacaaaataatttataaaatattatttgggatgtggaaaaaaaaaagttacagcatgattgtttcaattttggggctgtaacttttttagaagctttaaatttttttttacaacccaaccaatcattccctagatcctttctttcccaccttttggctttgggagttccatgtccaataaatccaactccaatgtgtttaaagccatgaaatctatatattgtcttgtacacaatgtaagccgagtaacgagttttttgagataggatttgagtattcatcacaccacatattttgaatggaacttcaacgagaagctctcgtacttgatcaaaccttcacaatccattgaatgcattattatcagaatgattccatatcaatcaaatgtaacgaaaaaaggaagtacctagattcatgaattgagatccattgacaaaaataaggactaagagcaggtccaatggagggttttaaagggctctagaacaaaagactcttcccatttaagtccaaaattaaatcaaaattatattaaattagaagaaacgttcctaaatttagagatttttgtgaagctaaagtaacttgacgtgtcacggcctgattggtcgtgagtttgagaaaacaattgtttttctgatatctgtgaaatcaattgatcttcaacacccatcgattgatcatcaaatccgaagagaacgactaattgggtctcttatttcatccaccgtgatcatcaaatcggttaacaattgattttttttttaagagacccaatttaagattccaccattggaaacccaaaaatacaaggacccatcataatctctaaactatacaaattctcaaaatttattactataaaattttaaaaagactctttcaaaggcttaccattgaagatgctcttaaatgtgatctctagttgcgtcgctgataacatgacacatctcttcccgctctcttcatctaagcagacactctttgattttctttttttaaatgcaaagcttcaataaccatatttaattcaataacaacattaattttaaaactcaataagtcaataatttttaaattaaagtaaaattttcatttcaaatacactatattaaaaattataaaaatcaatagtgtttaagaattaaatttaatcaaaagaatcataaatccgttttattttctcatatttaattggctgtcaacacctatgtcttcgtgttttgtttcatacttttcatatttcttcttgtcatcttaattatcaattttcttttgatcattatcatcattactttcaccattcgctctttttcgttatagtcttcatcttcatcttcatcttcctctttatcttttttcactttcttcctcatcctctccatattattatatgtaaaatattcgttattatgttgttaaaaatagaggaagaaatttaaatttactaaccttaaccaaaaatagttcaataagcatgtgaattaactatcaaaacaacttaattcatttcaccctctgaactcgaaatttgaacccttagttctcacatctcccaaatactctaccaaattttagaatattccgagtacgttggatgtttatttgttgtcttcacatatttattcagatatgaaactttaaaagaaatcttctcaaatctgttgaagaaattgtttaaatctatatccaaccataaaaacctagttagaaaaaaaaaagatgagatcgtgcgctaaataatcaaaggatgttatgtgaaactataaggcttatagtttcaaggcctcattgcatttaataagtactagattgataacccgtgttttacccgaggtcctatgtttcgatatattttttttctaaatttttaaactatattattaatttagaatgaagattttattttagtattgagtataatgttttggattgttagtttagtgtttgagttgaatgttgtatattaattttgaatagtaatatgtgtgttaagttttgagtaagtattttaattaaatggataaattttattcttaaacatttgaatttctatttaaaattatgtgtaaattttaattctagattttttttcttatgatacccaaaaaatcactcttgtttttcttttggtaatagaaatagttaaggcactgagggaagtcggagtataacgtcttctttccaaaattgtattcgaagatcttctcaagagtgaaccgccaccaacgtcgtatcaattagaggccttctcaagagtgaaccgccaccaatgctggattgggtaaccgaaagctgaaaactcacaagtagtcacaacatgtgacagccctaagaaccttactacatgttgtggtttcgggcttggggattatgagttttggcctacaatcttctgatattcaaaaaaaaaaaaaaaaaaaacataataatgggctcttagataaaagatagcataaagacgaaaaaaggcaaaatagaggtattctctatggtcttagcagaaatcttacctgaagacgctaaacccaacatcaagtttgccttcaagctgatccatttctcatccaaaatatttcgttcgcttaaatacgtaacttttcaaagatccttcacctccacaacacacagatatgtctctaaaacctgtggacaatttagaaaatgtcacttgtggtagaatacgcagaggcttcaaaccaaacctgcagcttataaaccaaaacatgcaatttctcaaccaaaatctgtgccatagttcaccaaaacctgcaatatataacttagaaagccaaaatctgaaatttctcaaaccaaaacactttacacaaaatagtacaaaaaggaagggtagtcaaagacaaaacagcaaggaaactaaacatatggacttacaatcatatatacagaacttggagccaaggtaagaggaatagcaacagaggtgatcttgtccattggtctttgtagactcataaaacaaacagagatccttgtcatatgcagaaactcaaacaaccgataaagataggaaactgagggtatattgatcgtttccaatgacgaggatgggccttttggcccgtcgagagcgacggtgctttcgcagaaaaaaggaaatttctattgattcgccactctcttctcctatataaacctcaattaccaaagccagatttcaaaaaaattcgcagctttctaatttcactctttgctctctagggtttgcaactcaaaaaaaagtctaggtttttgactcgatttcataagcttttcaggtgattcgaaaacatgtctctagttgaaaacctttctcttgagccacaacccaaaagacgtaagatcgatccagaggtcaaagagtctccgtctcgtaactgcagtcactggttcgtccgcaataaagtctgtgcctcttgcaatacaatagtggacaattaccaaggcagatctttcgattacctctacacagggattcagatgagtaatgaagctttaggttttacaaaacggctcatctctcaaacctcttggcttgaagacaagaagcttcacttagtacttgacttggaccacacgcttgttcacaccattaaagtttcacagctttctgaatctgaaaagtatataacagaagaagtggaatcgaggaaagatctacggagattcaacactgggtttcctgaagaatctttgataaagctgagatcttttgttcaccagtttctgaaagaatgtaacgagatgttctctttgtatgtttacacaaagggtggttatgactatgctcagctcgtgttggagatgattgatccggataagatttactttggcaatcgggttataacgagaagagagagtcctggttttaagacgcttgatcttgtgttggctgatgagcgtggaattgtggttgttgatgataagagtagtgtttggcctcatgacaagaaaaacttgctacagattgctaggtacaagtattttggagatcagtcttgtttgttgtcagaatgtaagaagaagatagatgagagtgatgagaaaggaccattgaacactgctttgagattcctcatggatgttcacgaagaattcttctgtgactggtcgagaaaagacttggattctgtggatgtcaggcctttgctaaaggagatttctttgagatggaagcgtaaagcagacggtgtggtttgaaatcaaagtgatgattcattgtttatgtttctatgtgtttgtttattattttagatattgatttgcagctattgtaatgtgatgagacttttgattcagattcaatctataatgttttattgatgatgtattaaggttcttctggatggtacttacagaaacttactcacaataaggatgttgttagttctaacaatatttagtgagacaagaaacatgtaatgagataagaacttgaaattgaaaggtgactccactctagactctcactcaacttcccaaaaggccaaaagagaaagagcacctttgtgtttcatccttgatacaatcattaatgatgtttgtgtttaattccctcaatgtatgtgacatgaaacatctctaatttggaaacagtccttgtcctgtaacagtgacagacgagtgaacaacaaacatggatagtcttatagacatgaaacagccttagcaacaactttctgttggaggttatttctttccataaggatctcaattatcagcaaaacctttgtacatgcatgattcaatcacttattcaattcagtaggttttaaattgcttatgttgtaaccatgttgtcttaattgagtgaacaatatattcatctattgttatatggtatcgaacctttcatgtatgaaaaaagggattgtgtcactgtagcagtcgttttgtaacaaacaagaataagaaacataaactagataccttatcccactaattactgttggattagtgaaggacttttgataaatatgaaacagagagacttgacgagagagacagaaacagagttatgaaattacactgaaacttcttattattgaaaaactgaaaatgtgttacaaacaaagacaacgtgtttttatagtattcaatagacacgaccaaacaacactaagaacaagagttgcaactcttctcttctaactattaacataactacccttaaggcaagacacaattcttaatctataaacttttactaacctttctaaataaaacaagcgaccaaactcaattactctaaatcacataaacctttaccctataacaaaattagtccagttgttgtaatgtaacaaaaacagttcagttgtttttctcaaaaagattacaacaaaaacataaccgaaaatcataatagcgttcttccactacagtaaactggtatcagtttaccgactatcctttggccggaattcaatgccttcaataatcaaaccactcttcatattcatatgagggtagcgagcaacgtctacaacactcacctcaattagattgaaacctattaatcctccttcattgtaaaaatccccaatctttgcctccatccacccatcttgcctcttcttcgaatcaaaacgtatgaatgtcttagacattccatgtctctgaaatccaactccagcttgtatgggagaagtttgaaagccattaaaatgagatgtttttgtgtacacaatgtaagctgagtaatgagttcctggagatatgattcgagtattcaacacaccacgtatatcgaaagaatctatattgagaagttctggtacttcatcaaacctgcattacacaattcgtgcagcatattagtaaagcttcataattcatcttacacagttcgtgcaacataccttttttttgcacccataatcaaaataagtcattaagaagaaggagttacctagattctggaattgagatccatttccaatacttaggatttactacccgactgatcaagagtttctttgcagataacattacacacttctttccactcgctttatctaatctgaaactctataattttaacggagagaacaaaaaaaaaactcaaaagtaagaaatgttaaacaatgcatgaattagaactgaaatcatacattttaaacaaacaagataacattaaaaataatataagagattaagacccaatacaactagttttagtagaatgaaatagacttagtacaattacaccaaaattgctccatcattaaataagtttattcaaatccctgttgccataattctctaacagaatccatacataaattccaattactgtataaggatatataaaatataccattttgccattgtggtttggaaacggatcgcaaagagcgaaatagagttccttctttgaagagaaaactcgcgattttggaagcagagatacataatccggcggtggtagaaacttctcccatacgctatcggaattgaactgcaagccaaagcttttcgaaaccaaagcagcaaggaacgcgtcccgtggagtacttgtaaaagagcttatgatagctaagcaatcgtctggcaagtcatcgaaagatgccgaagaaccattgataaattcagtgagaatctcccaacaaccacaaaattctgcgcctttccctcttgtgtcaacgccatgtttttggcccattcgatagttttcttcctctgcaagctgagactttcaagaaatagtctcagctgctaaatgttttaaaaagaaagactcgttgtaatgtcgtccactcgttaacgaaactatcattctttgcgtcagtgtgcacgtttgatgttcgttttggtatttggaaatattctaactaacaaatcatgttatataatttagtcagattagtatataattaagatcatcgtgatataaattaattatctatatagccgacttctcatgtctatctaataaattcgatctataataaagtccataaatgatatatgaacgtacaaactttgacttttttacgaattttgttcacttgaacattaacttttaacaaaataaagaaaaaagagagaatcatgatgaacaattgaacatcataatcaaaaacccaaatccagtattgttacaaggtttccacgatatacaacaaatttataacttacgtagacattatagtcatacaaaaacataaccagaatttacaatccaaaaacttgattacaaaatgtttttccaagatatacaacagtatttttaacttagtcatgtaactcataccaaaacaacgtaagctgcgtaatgagttccatttacaagaagggaagacaagctggtctggctacaggtaagtcattgcttctccctaaactaaacctattgttgaaactcaacaatatctacctcttacaccgttaaaatttgatggtttctattttaacgtcattctgcttttcagtgcaaatatttaggtccagttttaaaggacataaatagtatttacttgagctgattcactttctgattcacaaagtatatttcatttttttcaaatagacaacataaacataacctgaattcaccaaaccgtttttccactatagtaaaccgagaacacttaatttactgacaatcctttggccggaattcaattccttcaatcatcacaccacacttcaaattaggtgaagtaacgtctacaatactcacttcaacttcatcaaaacccattaatcctccatcattgaagaaatccccaatctctgcctccatccacccatctcccctcttctttgatttcattagcttcttctttggccactctttggttttatcggtagactcgtcaaagcatatgaattgtttaggcatttcttggcctttaaatcctacaccaacttgtataggcaaatctcgtaagccatgacgttcatcttttatcttgtacacaatgtaaactgaataatgagttcctagggataagatttgggtactcatactaccacccatctggaaagaacgattattgagaagctctggtaccttttcaaaactgcataacacatttgagcaacattttttcaatcatatgttcatgaattggaaatataaatccgaaatacgcaatataatgacatctatatacatatttttattatgtactaaatgattgatcgtcaattcgtcattatagtaatgtattgtcttaaaattttatttatattttgaaacaataaagccaattgatttacaactaaatttcggttcgtttcaagttcaagcatttcgatttagttatgctcagtgtttttttatataataaaaaggagtcattacaatcgaatttaagtaataaatacctagattcacaaagttcaatccattgccaatactcaggattattccctcctgtgatccacagttcctttgcagctaacagtacacactttttcccacttgccgtctctaaccaaaagctcttttattttcaaaaagaaagaaaaaaatctcaaacgatcaatctgaatagatagtttcccacttgaaggcaagagacaggtcattattctcaaaatgtagaaacaaagtgtaaaactgataaatggacaaatataaatacctttttgccatcctcaactagaacaggatcgtagcaaagagtgaaatagaggtccttcttcgatgagaaaactcgccacggaggaatcagggattcatactccgacggaagaaacttctcccatatactatcacactggaccgcatgtgcgaaggattttgaaactgaagcggagacacacacgtcccgtggacttgtaaaagagattatgttggagatgcaatcctccggcaagtcatcaaacggcgaatgaccgggtacgatctctcccccgcctccaccgatagattccacgtcgtgtttttgcaccttggatgaggaaccgagaacttgtctgattttttgtctagagtcaacgccgagtttttgtcccattgttgcttctacctgtaatgtttttcttcgtttagattcgaagataagaatttaaagactcgtcgaaagtcgtctccgacgctaaatacctataagaaaaagccgtgcacacgtattgaaactgcccttctttggccattaagtcaacgcccgtgttttcgttttcctcacaagtcacgttccatgtgtttcatgcgtttttctttgtttgtaaacatttgtttaatgtgtttaatgtcggttcaatattttttgacaacatcttctactcttatagcaaaggtaaaacttaattttcgcaaaacaatttatttattataccacactcaaccgaaaacactctttcataaattggagtttaactctttacttcgttgtaaaactaattgacaataataccggttcatcaggtaaaagggagtttaatttctagggcatttcattaccgggttttttcgtaggacggatttcaattccttgaataatcaagccacgtttcgtattgcgctgagtagtctctgaaacactcatctcaatttcatcattattcctaaatgctccttcattaaagaattccccaatctctatctccatccacccatcttctctcctctcgggattcactaggttcttccttgtaagaaactgccactccatagcctcatgaaagcatacatatcttctacaagattcacttaattcatgtcccaccattctaactacagcttccatggccacatacgcaaagccataacatatatccgctttcaagaacacaatgtaaaccgagtaacgagttcttggtgatagaaaacgagtattcgttctgcatcgaatctcgaaccaacgtgttgtgagaagctctggtactgtttccaacctacacatgagcaacatatttttatcattaccatcatcttttgaaccaagtcattacaaccgaactaaaaaaaaatcatgaaaaattggtaccaagctgatacagggtttgtaatccatttccaagtgtgatgagtggaaaggttcaaagctgaagctgataacatcatacacctcttcccagtcgccttttctatccacaagtcctaatttggaataaaccaaaataatcatttatttattatttcaatgatttgattaaagtcattaaaatttttgtaaattagatacccataacactccctagaattcaaatagcagcacgaatttgaacttaaatccttcatcaaattgctccaaattagcataaattttttgagttaagctcgaatctcattctcgttgccataattcaatacaaaattttcattttataattagatagatatacctttttgctaacgttgattaaaacagattcgtcgcaaagagcgaaaaagagctccttcttcgatgaaaaatgttgcgatcgagataacaaagattcatactctggtggaataaacttctcccacactatatcggattggacagcagattcaaaggtttttgaaaccaaagcgaaaacacatgcgtctcgaggacttgtgaaagagattatgagggagatacattcttccggtaaatcacccaaagacaacggctcagtaacgccttggctttgttggtcggaagctgagagtctaagagtcttcttaactcgttgtagaattttacgaaaatgcacatgcatgcaccttgttttggtcattatcgtctctcacaggagtcgttggtttcggacttttttggtttggaaacattgttacacacaaccccaaattataaagagtcaagtaagataggcgttttggatgaaccgtgttgcggttggcaataatagtcccttttttatataatatagtcttgactcgttatgctaacaaatagaagaatgaaaaatgaaaaggtgaaagcaactcttcttttctatttgaactttccgaggaaaaaacacaacacgcaaaaaaaataaaaattaaaaccttttgaacaaccaaaatgttccaagatagtggaaaccttttgagttaataagtttaaatcacatcatttgaagccataattctctagcagaagctgattatttatagattgcagttagaacttagaatacgagacatttcatcactaaggaattccacatcagaaataattaagatgagtcataaagatattatataaataacatgtactaatctacccaccatccattgtttgttttgaagctattagcctaacaactattctataaaccttactaacaaagttcaaagcttatggacagacaaatatatatatacgtaactttttgccactttcgattaggaaattatcacagagagagctccttcttttaatgagtgtcagtatatgcacgaacaatagagttttagatcatcgaaacacattttttatttgtcgaatttgttcgtgtgagaatcatgaacattacattcgagaacattatggtccaacaagttgattctattacaagatgttttttcaagatataaaacaatgttttcacttatatcagcattagccattttttttttttttttgatataccctatcggctgatccggttagctttggtaggaacgcaccgaagtgatacagagtggacttctcccgatccaggtagaattggaccaccacactgcctggtccgagtttggaatgccttccgactaatgtcagagggtagtcaggccacctgcatttctgactaccaggtaaaccaattgggccaaagcccaactgacagactttccaaacaaatgtgattttgtttccaggaagaatcgaaacaaaatgtgattttattagccatttatactaatagcaaaacataacaggaatcatacaccaatatggcaacatcctttatatactagaagaacaaagttataacttatcttataacacacagttgaacaaacttttagcagttggaatttacctcttcattccacggcataagcagttgacaataataccaatagatgagtggttactctggtaaaaaccagcgttaagttctcggtatttcagtactggatttttgtaggacggatttcaattccttgaatgatcaagccacatttccaataaggctgctcaggacactctaaagcactcatctcaatttcatcactattgcctaatcctccttcattgaagaattctccaagctctatctccatccacacatcttttcttctcctccttcccctaccttttcttggaaactcatcaaagcatatagatcttctagaaggttcatgtcccaccactccaactacaacctctatggccagatctccaaagccaaaataattttccgtaatcttgaacacaatgtagactaagtaacaagttcttggagataggtcacgagtattcattctgccatggatcccaaactcacgtacttttagaagctctactatattttcaaacctgcttaaaccactaggaaaaatatatttaacatcacttattttgcatatttgtatcagttataattgatgcaaatgacttcacttatataatgaccctgaaagtggtacatattttgcattggttcaaataattatttgcatcgtttattataattttaatgttaattttgcaattagtcagtataaataataacggttataataagtgatgttaagtgtttgcataaattataaataattaatgttaaatttaataaacctatatttaattatttttaaaaataagtaaaaatttaatttcattaattaatatgaaaaaacaacaattaaaatttgttttggataatagttgcttattaaattttataattttttaatttaccacaaaaaagtcagtatatattaaaaaattatgaaatttggtatgagcgtgccaaaacaggatatcacgcggctggattactaaagaacaaccaatactaaagaacagccgaacaaactagcacaaatataatggaaaagggtacctagattcatgatatggtctccactcacaatagcgaggagaaactcccttcaaattgagaggctcatcactgataacatgatacacctcttaccacttgctctctctatccaaaagctctttcatttttgaaaaaatgttaaacaaaattagttaagaaaatcatagatattcaaaagtagcacgagttagaacattttcttgtcgccataattctgtaaacaaattgcaaaactgatggatatatatataccttttcgccatcgtcaattagaagagagttgtggcataaatcgaaaaagagctccttcttggatgtataatactgcgatccacgaaccatagatggatactccggtggaataaacttctcccatgcaatatttgagttggctgccgattcaaaggttttagaaaccaaagcaacaacgcatgcgtctcgaggacttgtgaacgagattatgagagagatgcagacctccggtaatgaatcgaacggcgaaaactccgaaacgccgtgacttttttcggaagctaagaaaagtttgagagtcttaagtcgttctacaaatttatgaaaatgacctttgattgccaacaatgcgcgcgtctcttgcacgttccttgttttgttcattgtagtctttcagtttcaggatacgtttggttttggatttggtttagaaaaattctgactaacgtacaaactcaatttatatagggtcaattcacgtaggtcttaagacgttaaaattatatagtctcacacgttaacatgaacactttttggtcttagtcatgtgttagtagtcatttagtcttcgttagtttttttttttctcttcgctaggtttttgtttttatatcgtcagtgaggcttagataataagatattcaaattattatcggaacaatatattcaaacaagattgtacgtcctttaaagaaacatcgttgtggttgtataatggccaactacagtggcggatcgagaacatcttttaacctagggtataattatataaactaaatttaattaaaaatatatagtactacttaaacaaaacaatttacaatacaaaaaaaaattctacaaatgcatcatatgttcttccttatttctgaactttttcatcactttgttaaacaattttgtttcactaagacttactaaacaatggtttagaaattgatcacaaattcggttatttaaagtagttttcacattttttattacatagaagcatttttaacatattagaaatcaataatacagtaatcgaaaaactgtttttccacatttaataaaaaaaattgaaaagaaagagctaacaaatacaaaaggaaaagcaaactctttagttgactctggaattttctacaaacaaaaacagaaaacacgtttggacatttttgaaccatatcaccaacattaccgacttatattattgtaataaatgtgatttaaattaaagtcgacattagagttttagatgatcaaaacactatgtttttagtatcgaattttgttcatcaaagaatcatgtacattataatcacaaacattacaaccacaaatatctctgcctttgcctctagagtcttgcttgagtcaaagaaaagactcaaaaccgtgttttgtctctacaagcgtctttgccgctaaaatattcaaaagaaaaagactcgttttttgagtcacccacacatatttacgaaaatacccttatatgcattaatgtcctttaatcagaaccatcaaatcattctttgaactgcaagacactggtttacatataacaatagggcaacatcctccactacaaggacaaagttggaacttagctaacttagcttatcacacacacaacggaatacacttttatcatttagaatgaccttttcactccattgcataaccagtttaacaacaataccaattgatgagcggttgattgataaaaaccagcattctcggcacttaattaccggatattcgtaggacggatttcaattccttgaatgatcaagccacgtttccaatgacgctgcttagcctctaaagcaaccatctcaatttcatcatcgttcaataatcctccttcattgaagaattccccaatctttatctccatccacccatcttttctcctctctggttttactaggttctttcccctatctctccttcgaaactgctcatccatagtctcatcaaagcatatatatcttcgacaagattcttctaaatcctgccccaccactccaactacaacttctacggctacattctcaaagccataacatatattcaatttcttgtacacaatgtaagccgagtaacgagtttttggagatatcacacgactatttattctgccacgaatctcaaacaaacatacttcaagtagctccgctactgtttcaaacctgtataaggcatggtaacatttttcagcaagaaaatcatctaaacgagtcattaaaaccaaattaattacgtaaagacgatgaaaaaagatacctagcttgaggatctggaatccatcgccaactctgaggagaattcccccacgcgattgcaaggttcatcgctgatatcatgatacatctcttcgcgttcgctttttctatccataagctcttcgattttcaaaaagaaaaaaaaaaaacaaatgatcataaaattcaccaaattgctaaaaactatagcacaaaatttcttatttaaacttaaatcacatcattattgtcaaagttctctaactaaatttgatgattcaaaaaaaaaaaaatcccatattaaagatagatatacctttttgccatcgtcaattagaacagatttgtcgcaaagagcgaaatagagctccttcttcgataagaatttgaaagctcgggattgagaaatcaaagattcatactctggcggaataaacttctcccatacaatatctgacttgaccgccgaagcaaaggttttcgaaaccgaagcaaggacgcacgcatcttgagggcttgtgaaagagactatgattgagacacattcttccggtaagtcatccaactcagcaacgccgtgacttttgtcggaagctgagagtctaagagtcttcttaactcgttgtacaattttacgaaaatgctcatgcatgcaccttgttttggtcattatcgtctctcacaggagtcgttggtttcggacttttttggtttggaaaaattctaacgaacaaacccaaattataaagagtcaagtaaggtcgactttgtggaattaaaccgtgttagagtggaataatatgtcattcccgtcattcttattataatatagtcttgactcgttacgctaacaattactagaaaaataagacttaaaaaggatatcatcacataaacaatttagaatgatacatccattcacctatcttacctttcttcgggtttcctccttagaaactactcatcggaagccggatcaaagcatacggcggccctggctaagaccatacggatccaccactctaccttcagcttataaggggacatcccaaatccaaaaatataatccaatttcctaagcactaagtaagtttgagtgacgatttttggggacagaagacgaggattcaacttgtcgtgaatctgaagccaatttgtacatcaacctctcctactctttcgaatctacgaaaaacatgggcaacatttttcggtgttgatcatcaaatgattacaaaatagatttgtacaccaactttttcccgcttgctttgtctaaccagaagctcttacactttcaaaataagaaagagctaaaagactatcagagtatttcaatctctagaactaaacgctttgttttggcctcacaaacgacaaaccgaaaactcctcgaggattttcgcaggacggatttcaattcctagaatgaccaaaccacgcttctgctgggcgtatttaccctctacagtacttatctcaacctcatcactactcattaatcctccttcattatagaattccccaatctctgtctccatccacccatcttctctcaactctggtttcgccaccactttcctctttcgagcctgccccttcccatgcgtatcaaagcatatgaaacttctaaaagactcctctcccactatcccaactacagcctctatagacacacccttaaagccacaccaattatccgctttcttgaacacaatgtagaccgagtaacgagttcttagagaaaggacacgagtattcattctgcaattaaactcaaacctatatgcttcgcgaagcgccgctactgtttcaaacctgcatatcagtatatcacttggcaacataattatatgatcggattgagttgaaataacacaaagataatgaaaaaggagtacatacctagattctggacatggaatccataggaaacgctgagacatatctgccatgcttgatagattcatcgcagttgcagataacattatgcatctcttcccactcgctttctctaaccataagctcttcggttttcgacaaataatcagagatatttagtatcatcagcacaagatagaacttcaacgttaattcaatgactctaacataccaattgtaatttcccataacttctacattgctaatttgtagtacatgattctcagatcgtgtaaacataaataggttaagattttttaccattttgccatcttcgattagaagaggatcgttgcagagagagaaatagagttccttcttcgatgagaaaactcgcgacggagtaatcagagattcgtaatccgtcggaagaaacttctcccatacgatatctgatttcaccgccgattcgaagatcttcgaaaccgcagcagcgacgcaagcgtcttcaggacttgtgaaagagattatgtttgaaatgcatccctcaggcaacgaatcgagagtagaagagacgatcttttttctgctttcgcttcgatttttctcaatcagtgtccgtagccgtatcatcgtctccgtcgatgcccctgatttgtgaacaatgagcgcgtctacttcccgctcctttgtattttggggtcatatgggccttttacaatagagaagcccataaaagagagccgttgatttgggctttccggcaaacactcgtaagaaccttgtgagtgatcaaaacactatctttcttctcaatatactgaaatcgttcatgtgagaattatgaacattataacatcaaaaatccaaattcagaaacattactatccacaaattagaggccaagatatacaacacagttatttaacttggtttgacatctatactgaaaccaaaacataacccgaatcatccaaccgttcttccacgggaagccggtttacataaacataccatgataccaacatcctccacttgaaagaacacggttggaacttaacttttgttgttcaccacataaaacctaacataaccaatcaatacaataaacaaccgaatatacttttatgaatttgaatttacctcttcggtcttcactccaccaataataccaatagatgagccgataatcgggttgttccgccgcattacttcagaggattttagcaggtcggatttcaattccttgaatgatcaagccacacttccgattgagctgcttagtctctaaagcactcatctcaatttcatcattatccattattcctccatcattgaagaactccccaagctcaatctccatccacccatcttctctctgcttaggtttcacaacgttcctccttcccctccttatagcttcactaaagcatattaatcttctagaaggctcctgtcccaccactcctaccgcagcttctatggccacattctgaaagccataacatttatccactcccttgaacacaatataagccgagtaacgagttcttggagataatacacgagtattcgttctgccacgaatctcgaaccaacatacatcgcgaagtttcgctactttttcaaaccttcataacacagggcaacaattgtccatcatcatcccaacgagtcattacaaccaaactaacgcaaagataatgaaaattagagtacctagattcaggaattggaatccattgccaatactgaggattatctccccatatgattgagaggttcatcgcagataacatcagacacctcttcccactcgctttctctaaccatacgctctttgatttccaaaataatcaaaatgattcaatagcagcaaacttcaaaattacaccaaaatagagatacaaattgcaactttaaggcgatgagatgagacagatcattcattattcataaattttgctacctttttgtcatcgtcgaatagaacaggatcgttacagagagagaaatagagctccttcttcgatgagaaaactcgcgatggaggaatcagagattcataatccgccggaagaaacttctcccatataatatctgacttcaccgtcgattcaaacgttttcgaaaccgtagcagcgacgcacgcatcgcgtggatttgtaaaagagattatgtaggagatgcaatcttccggaaatgaatcgaacggagacgactccgatttaactctgcgttttctccccatcgatcgacgcttgtatcttcgtcttcgtcttccacggaagctagtgtaaaatctcaagtcgttctattaatttacgaaagtacccctaaggattacgaaaatttcaagtcgttctacatattgacgaaaatagccctgatttgtgaacaatccacgcgtctacttcacgctccattgtttttttttggtcattattgtggattcgttggttaaggatttggttttgaaaatatccaaattccaaactaacaaaccaattaaaaaaaggtcaagtcaggtatgcattatggatcaacggtgggaatattatttgttttgaatttttataatatagtctgactcgttattccagaaaagtaaagcttaagctaacgaatacgaaagaaaaaattgataaaaaatgaaattaagtaaaagcaaacaatctatttttcatttgaattaaagaaaaaaaacaaacacaaaacacgcttctcttgttgagaagctagcaaaacaacactaaacctgaaacaaacgtaaatccgccgcaacaacccagttttttccgacggcgtacaagcttcctccgccgtaacgccgtcgtttaataccaagaagcttgattaggtttccgtagtgtgtgatttgtgagattcgttaaaccctagctctactactttataattcctgtgatgatctttagctagattgagagatcgaagtgatttgattactctagtgatgtatttgatcgtttgattttgggtttgaattttcccctttttagacgtaatcggaaatttctatgttcggagagttttgattctttctgtaattaactttactttttcgttatcgtttacttgtatgtaatctctttgtgtgtctttcaagttgctgaagttttttcaatactttgatttttaagctaagcatctttatcatctctctgtttatctattgatatagctatgttctagggtttgtttccattatccttgatcggttttggttggtttaatgtatagaacagtgattttttcctgttttgatggcttacaaatagtgattttatgtctctgatattgaattttggcttcagttttaaggttctgaacactgatgtcaaacccattgaaagagtcaagagaggatattgcaaattctactcctcacatgagggataatgagtatgttcggctagttgtggctcatgaagcctccccagctgaaaccgtgttgtctctatcgcaatcagaggtgcagagtaagaaatttatgtggtggttaaaagctttgggaatatgtgcagttgctctcttgcttacgcttgttttcggaaaatggggagttccgtttgtgtttcaaaaggtaatttctttactcaaatctcaagtttctgatgattatttccttgtgatgatccatgtcacatactctgctctttggattgtaatagtttgtttctattgaaggttcttattccaattttgcaatgggaagcaactgcgtttggccgtcctatgctcgcgattgtccttgttgtttccttggctttgtttcctgtgttcttgataccttctggtccttccatgtggttagctgggatgatttttggttatggtctcggttttgttattatcatggttggaaccaccattggcatggttctcccttacttaatcgggcttatgttccgtgatcgcctccatgtaagaacccttcacttctctttttctcatgtcatatgatcattttttacaagctcactgacttgtagatatgatttgttttttaacaaaatgcagcaatggttaaaaagatggcctcgtcaagctgctgttctaagactagctgcagaaggaagctggttccatcaattcagagtcgtggcaatctttcgggtttccccatttccttacacgatttttaactacgcaatcgtcgtgacaagcatgagattctggccttacttcttcggatccatagcaggaatgataccagaagctttcatctacatttacaggtcagtcttactctcctcgtatcaaaacagttaaaatcagaagaatcgaaaacctaattctaaattccgattcatatgcagcggtcggttaatcagaacattcgcagatgtgcaatacggacatcaacgtttgacaacagtggagattgtgtacaatgtaatctccttagtcattgcggttgtgaccactgttgctttcactgtgtacgcgaaaagagctttgagagagcttcaaaacgcagaagctaatgaagatgaagaagttcaagtaagaaaagtgagattcgagatgaagaacgtagttcagcacgaagaagataatcatcagcgtttgccttagccgaaagttgacacaaagctaagataggtttgtataaagctttgaacgttgacatgttcttcagcaggatttagagtaaataacaaaaggggtaaaaaaagtctgatatagtaggaagactaagactagtcaagattggatttatattagtgtgactgattccaattattgaaacaaataaaagaagcatttaggctaaaatagtgtatgaaaatatggatgctcatgctctctttgatctagtagtgtatattttaatctacggttgtccaggagtttttagatttgctttttaggcattacttaaaccacatttgtacaattcattagacaattgattattcatttcacttcttagccatgaaacaatgttaagagcaaccccaatggttgggtcgttaatagtgttcttccgatttttttaatcttaaattttgtgaattttaagtttaagagtttttattggtccattatttttttcttgcttagttaattttttcgtagtcgagtttttaagtggattttttacaaaaattattattattaaaataaaattataaatattttatttcataaaattgaataattaatacaaatactaaaaatttaaatatacaagacaaataatgaaaactggaacaacaattagtagttggcttgattctcgccaaatttgtgtcatatattctcaattaaatcacctttcaattgttgatgcatattccgatcatgaactcgggctcgagacaccatactattaccgatttgatgattacgcaggatgataaggagctcaacagagatcatctgtcatcgccatcgctggagactacacgaaagaaaatgttcaatcgaaataaaatatcaagggacatattttttcttctctttcctctcaactaatagcaacttgccacgtaggggtccttagttgtcgacaaaatccctaaacatagaaacgtccctctctaataaactgattaatgatttaattttttgctatattactcaagagatcaaccctcaagagcccattaggaactgccgttgagcttggtctaagatttccggttcagtttgatagtattaaaattaaaccgagtgtatttggattaccaaaataacatttaacgttcacatttttaaaattttacattagcattgtactattgggttttaatatatggatttttgttttcaacatattattacataaaaagcattctaaactcaaatcaaaagctaaaacaaaaacaattgaaagacccaaatctgtcatggccattaggcatgactcgacgaagagaactacaagctttgtctagaacatcgttgatagcctaaagagttttaccataaataaaaggttgaattgccttcataaatgaaggggaaaaaaacacttttctaaagaaacttcaacatatttgagcgttcgaccaaagttggtcacaacttaatccttctgagtcatcagagagaagctacgctaatgtattgatcaatcccaccttctcatgactaagcttcacgcattcaaacaaattttaatcagcttatcaagacatcgtattgttgctcggatctcatctttagaggtattacaagaaaaaaaatatcatatcacactatttctataacaagttgttaataatacatgtcgaagtttaacatacagtgtttcagatagaatctctagtctcctttagttcctttcaaaatatgttcatacatggagaaatatatgtcttcaaagcgtttgcatcttgactatcatgaacaaatgatgaaccggacaatgctacatcctgatcaaaactagatgaatcatgagtttctatgatcacctccatgtccataaccaaaagaatcatgggcgtcaaagaaaagaaaaaaaaaaacactttatttcatatgatttgtagatttggttcttataatatactctttaaccaaattacagcggcaaaatttatatttttgtagaatttacactctaaaaaaatacaattttctaacattgatagaacatttagttttagtataatgaatattcaaacaaatttggaacatggagcaaagcgtagaatgcatgttccaaatattttaaaattttgatattcagacttctaaaaactttagaaacgaaaacttgtataaaattcgtagaacatgtacaaaaatataaaatacatactctatttttcgtagaactctagaaaatgtgttctgataaaattagacgaaacattttctatcaaaaaatcaattgcatctaatcttcaatgatttcaaaaacttttccattcaaattctctatgtaaatcaatcatatttttctgattattgttttaaaagtctgattaaaattagaacaattcttgggtttaccccctaaagggtgaatccattcattcacccccttttaattgatcaattagaattttacatgtaatctatttaaagaataaataaattaaatcacaaaatctaaatcttaactacaattttatcaacccaaaccaaaatatatttcgtttaatcacaaaatttaaactttaaccactattttatcaacccaaaccgaaatataatttcgttttaatcacaaaatctaaaccctaaccactattttgtcaacccaaaccgaaatataatttttttttaatcacaaaatctaaaccctaaccactattttatcaaccaaaaccgaaatataattttgtttaatcacaaaatctaaaccctaactactattttatcaacccaaaccaaaatataatttcgtttaatcacaaaatataaaccctaaccactattttataaacccaaaccaataattttcttaataaaaattctacagaatttgtttccttaatttgttttgttttactaattttaatttttatttattctttaaatagatgacatgttgatttctaatcagtcatcaggctatcaacaatggttttttcattcaacaccctccacgtcatcttcttttttccacatcatttcttctctcttccacataataattcaatacccacttaaattttatactctactatggtttgcttaataaaattcaacactctacccactatttttatttcatttttctttcttttatgttttaaatggataattagtaaaaatagatgtatttttttgtatccaaatcaaataaaacaagtctttatttatagagtttgaaatatggtgaattttaatataaaaaaaaattaaaacaaatatatattttataagataattgatctataataactcagaggaaaagtaaatatcagaaatttcagtaacaaataaaagaataacacatgtcctatctatatttaactcttctctcacaatttctgtctccaattatttaatgacaaatagcagtaaggggttcatttttaacaattcaaaattgttgaatccgttcaacaccgttgaatccacataagattcatttctttatttaatattccactgtaagcattcaattattgaattaattttttcaatagcccattgtatatagtcttaaaaaggggtgagtgaatgtgaatgaatggattgtattttcttaaaataatgtgtaagtcatacgtgacaatttcacaacaaaaatatttatatggacaaaagaaatttggtagacatatttgatattcccattaaaaaattgcatgagaaaaagaatatatatgaaatggtttggtttcctttctaaacaagaaaaaaaaaagtaatctccgaagaagaacaaattccttgctgaatcatggttaatttcgaatctctttctatctaattttataaatgtgatgataacagatcatcgtctccactcagtttccgtttgatagtcttatgttaccgatttttatcaggcgaagttgaagctctactcttactggagaagctcatgtgctcatcgcgtccgtatcgccctcactttaaaaggtaccagccaatgattttattcttttcttgtgagcaattctttgatctgaatttggttcttgttcgattttcattagggcttgattatgaatatataccggttaatttgctcaaaggggatcaatccgattcaggtgcgtagtttctaggttatattgaactttatttgaagtaacattgtaaagataagaatggtaagtaactgagatttcttatgttagacttagaagtttattcgttttggttctctagatttcaagaagatcaatccaatgggcactgtaccagcgcttgttgatggtgatgttgtgattaatgactctttcgcaataataatggtcagtagtaacacatccatttagtttgtttggttttgttgatgaaaaggaacattcgtttattcgtcttgttgtttttcaaatggacagtacctggatgataagtatccggagccaccgctgttaccaagtgactaccataaacgggcggtaaattaccaggtatcttcgatcctttgtcttcagatgatgatgtgttgccatcatctgcaaaaccatgtagttaagtccaaatgtagtgaacattatcagctttagattgcgagtgtgatcgttgttcttattttgtatatttcaggcgacgagtattgtcatgtctggtatacagcctcatcaaaatatggctctttttgtgagaagatgagattaatgtaatggattctactaatggaggttctataacaaagcaaacatagttacattttgtcattttttttaacagaggtatctcgaggacaagataaatgctgaggagaaaactgcttggattactaatgctatcacaaaaggattcacaggtatgatatctctaatctacctatacgtaatcaagaaccaagacatatgttcaaaatgtgattttgttgatattgtggttgtacaggtttataacgacctgtctgataatgtctcatatgtccttcagctctcgagaaactgttggtgagttgcgctggaaaatacgcgactggtgatgaagtttacttggtatgtctctaaatctccctggataatctctatggtactactctcttctttattacaatgaagcattgttttgcaggctgatcttttcctagcaccacagatccacgcagcattcaacagattccatattaacatggtacttttcctcagctaatctcttctcctggtacctagatattgcattgtatatccccccaaattccatggaatccttgatcagagttttaaggtagcatgaaccaaatgttatctctgtctcacactttcacattcacagagtaacatagacgtaatactcagtttcataactttttttcctcgcatcacttggttttcatctctacaattttgttgtataggaaccattcccgactcttgcaaggttttacgagtcatacaacgaactgcctgcatttcaaaatgcagtcccggagaagcaaccagatactccttccaccatctgattctgtgaaccgtaagcttctctcagtctcagctcaataaaatctcttaggaaacaacaacaacaccttgaacttaaatgtatcatatgaaccagtttacaaataatatttcattccaaacataaacatgttgtattcatcagagagattcagtgaaagcttacataaaccgaaaatctcggtttgatcgggtcggtttgatcggtttccaccgaaatcaacagggctctcagatagactcttttgactgaaaagaaaacaaaaatatttgcatctgatttacgttgaccgtaaaagacaaaaaataaaaataaaaaaagtctagtgtcgtcgtcgtcgtcttcgaattcgccacttcttgtatatacaaaacaaagtaatcgcgaaaacacacaacaatcgctggactctgctactgcgaagaacaacaaattccttgtttatcatggttggttacaacatctctttctatggtggataatagatcatcgtctctccactcaatttcctcgtaatttttggttttttttttcgatttgatcaggcgaattccggcgaagagaagttgaagctctactcttactggagaagctcgtgtgctcatcgtgtccgtatcgccctcgctttgaaaggtctcagctaatgatcttagtttcggttctagtcattttgtgagcaaagagtgttgttcttggtctgaatctggatcttgttgactttgttttagggcttgattatgagtatataccagtgaatttgctcaagggtgatcaattcgattcaggttcgtagtttcttgtttttgattcggattcaaaggttatattgaatttgatttgaaaaaagtgtagaagctattatagtaagtaagtaagtaatcatgtggatgagaatgttgaaatgtgcttatgaatcatttactgatggtttgggttcttgtgttgaaagtttatcgttttgatcttcaagatttcaagaagatcaatccaatgggaactgtaccagctctggtggatggagatgttgtgattaatgattcttttgcgataataatggtcagtagtaacacatccatttaagttttttttggtattgttgattaaaaagaacatttcatcgatcttcggttttgtggtgattgggttgacagtatctggatgagaagtaccctgagccacctttgttacctcgtgacctccataaacgagctgtgaattaccaggtatttcaagctttctgtcttttggtatttcgggtcaactcttggtttctcggtttctttctttgaatcatactttgttacatgtgtttccatgaacaatatcaccttagattgtcctgcttcccactctgatgcattttttattttgtatattgcaggcaatgagtattgtcttgtctggcatacagcctcatcaaaatctggctgttattgtgaggacatgagattgatgtcagtttcttagattctactgttctagatagagtaaacttagctacatttttcgatttttttacagaggtatatcgaggaaaagataaatgtggaggagaagactgcctgggttaataatgctatcacaaaaggatttacaggtatgcgatctctaatctaccctaatctgcaacactctgtcattggcatgagtagtaagatacagagacgtgatcaagaaaaagacatatgttagtgtttttagttttatagtgacctatctaattatgtctcctttctctttcagctctcgagaaactgttggtgaattgcgctgggaaacatgcgactggtgatgaaatttacctggtactactctaaacctctctggattttctttatggtgctatcttcgtaacatttaagattcaagtcagtgattctttggtaactttagcatagtaccctttattatacaaaccagcaagtagacaattgttaaagccatgaagcattgttttgcaggctgatctctttctagcaccacagatccacggagcaatcaacagattccagattaacatggtacttttccttctctgaatttttcttttgctacccaacactatttcaggcttagatttttgcgtactatattcccccggaatcctagatcagttctatggtagcataaattatatgttgtctctgtctcacactctcactcacaaagatattcatattgtagtaacatagacgaattcctcagtttattaacttctcatttgcatcattcggtttctgtttctacaatgttgtaaaacatgtatttctcttttataggaaccgtacccaactcttgcaaaatgttacgaatcatacaacgaactgcctgcgtttcaaaatgcactaccggaaaagcagccagatgctccttcttccaccatctgattctgtgaacccataagctactctcactttaataaaacctcagacaacaacaacaacaacaatgataataataataccttgtactcatacatgtatcatataaaccagttacgtatattataccatctcaattggaggtatctcataagagtttctcacaattaaaaaaataaaaataatgaaaatgaaggagagagagtgtagaaagtttctcacttgagaaactctaagatactctcaacaacctatcatgacaattctcatctcactattggttcaattttttaataaaaatatttttttaatcaaataatcaaattataatataatattaatattttttttgtttgagaaactttatgggtttctcatgaatggagatgcccttagtttctctacttgtatcatacaataaaggtcacagattttgaaatttgcaaagatatatcatacattctcagaggaagcctttgtctctaagactctggaccgtctccttaaccgcatcttcaaccgcagtaaaaaccagcccgagctcaatcaatcgcttagccgcatcattacacgacgtaagcccaggttgagtctctttatcaaacttgtgaacagcaaactcagggaagagcttagacacaagagcagcaaactcactgaactgataaatcccattagtgcataaaaaccgtccagaagcgtcaggtgtttcgaatagcatcacatgacctttagccacatctttcacgtgaaccacaccgagccagtgatgctcttgcgtctcggtcgagccttgtaaaagctgtagcagaacagcacagcttgcgtttaggttcggttgcagaagcggtccgagacatgttgatggatgaatcgtcacaatgttggttccatgcttctccgaaaattcccaagctgctttctcagctaatgtcttcgaaattggataccatttctaaaatcaaaattatataccaatcgttacaaatatcatataaatcatcactaaccattttaaaccgaaatttaacgaacctgcctcgacttgcaaaaatcaagatcggaccacgacgactcatcgacgggaactttttccggccaattagggttaggaaccaatgcggagatagatgacgtgatcaccacgcgtctcacattaaacctcttagcagcttccaacacattgatcgttcccttaaccgccggttcgaccagctccttctctggatctaccggtggatccaacgtacaaggtgacgccacgtggaacactcccgcacatccatcaatagctctggagattgcatcagagtctaagagatccgcttcaaagatcttgatcttagaatcggatccgggtagttgcagaagatgagtcgggtcggatcctgggtaaatcgaagcgtggattttagtatatcctttctcaattaacgttcggattatccaagatccgatgaaaccattagctccggttacacacactgtctctttcgccattgttgatcaataagcgctcactgagaatttttttgttctctctctctatcgcaatttatctcagaagataagaaaaaaaaaacatctttccagtaaaaaaggatcctttgtttttttcttacacgtaaaaaatggatttttttttctctcttaaagatataatgcgttgatacaaaagcgtaacgttgacatgatattatccactagttttatagacttttcaaaaaaaggagagaattttcaattcttcagtagtcaaatagatgaagaccgccggagcgccgccgcagagaggtggttcctcttcctcctccgccgtatactttaactggtcttcatcatcttgttcttacgatagctgtagagttttggtggtgaagatgggaggaaaaagcaagaagcctcatcaatcttcttcttttaaggtccacacatagatgcacatttatgtaaaggtttcttctttgagaactaaaagtctctttttaatccaaaatagttgagaattcgaagcgggggtttgtgatcaactaatccatcataacattcattgttttgaattgattctgaaatggatttgccagtcttttcttcttggtttatgatcaattggtttactgatttgaattgaataattgaattctgaaattcttctctgtttggttccttttagatctctagtatcggagttacggatatgatgaattgttcattgagcattttgcaaaccattcacttgattttggtttttgatggcaggagtcagagccagaaccaccgagaatcaaatccaatgttaagcataacttgcagcttctcaagttatggaaggcatgtagtagtagtgtgatctttttgtttcattactactgtgtctaagtctaaacattattagtgttcaagaatttgtctaagttacaatctttggaattgtatgatatatattgtaggagtttcagagcagaggatctggcatggctaagccagcgactagttacaggaagaagaaagtagagaaagacgagttaccggatgatagcgagctctaccgggatcctacaaatacgctttactagtaattacactctatttttactatcttcatattgtttttagaatgtattttgaggtttgaaagtttaaggaatgtttgtgattccctgaaaggggttttacagcacgaaccaaggtctattggatgacgcagttccggttttgcttgttgatggttataatgtgtgtggatattggatgaagttaaagaaacatttcatgaaaggaaggcttgacgttgctcggcagaagttagttgatgaacttgtgtccttcagtatggttaaaggtacaaactttggacgaatctacatttgatttcatctatggctaatgagtaatgagacaatttgatttgaaattgttgtagaggttaaggtagtggttgtgtttgatgctctcatgtctggtcttcctactcacaaggaagactttgcagggtacagtcatttggcccttttctgtctgttttcgatatccttatttactttgacaactcaaaaagttttatcctttttggccagtgttgatgtgattttctcaggagaaacttgtgctgacgcttggattgaaaaggaggcaaggaaaaatgatctctttacccccaaagcctgttcaaatagacggctttacgagaataattgttgatgtttcttcatttctgatattgataggtggttgcattgagagaagatggatgccccaaggtttgggttgtaacatctgatgtctgtcaacaacaagcagcacatggagcggtattggggcatcatatcgatgttataaactcgttatgttcatatcttgtttttgattttggtgactgattcttgacagggagcttatatttggagtagcaaggcattggtttctgaggtatgaagatcatcaccaaagcaatttgcttcttttttttttgtttgtgattttgattttgtgaaacatgatattgtagattaaatcgatgcataaggaggttgagaaaatgatgcaagaaacaaggtcaacatctttccaagggagattgcttaaacacaatcttgattctgaagtcgttgatgctcttaaagatcttagagacaaattatcagaaaacgaaacaaagagatgacaaaaagaccaatccggattatataaacaattaacaaggcttggtctctccatgtaacttctgtcccaagtaagtaagctaatctgacttgtaaaaaacagaggctgcagaggaaacgagggagatagagagagagagagctcaaatgctttgttattgttgtatttgtgtctgaattctttttgactaatctatatatagattcgttttctttggtccaaacatatggttaaaagatagttctgaatttttcttttagcttcatgcataagaatcatcttaacctaataacctatgtttattattttacaataatgtaaaaatgtaaatttttagttgaataatgaaccaaatttttatgtaaaaaaacttggatgtttattttcaaacacaaacatcagtaacacttgaagcagtagagagaattggaggcagagcaagtctacaaatttgcagatagttccagggtttgagctgtttgttctggtcagtctccaatcaatcaaagcatatggtttatcgagaatggatagagattcaagagaagattgaagaactgagtttgcaaaggcttatcaatgccttcgacttcgagttgagattgaagaaaaggtaaagaaatagcaagtgatcttttgaaaatagatctcatatattaatgactttccatgtctgtatttgctgaagttgatctgaatttgcatattgttcatgtcaatggattgtctgctgttactaaatttaactttgtgtcagcactctttacgttttgaattgtcgaaccattcacttgttcagttattatttggtctatccatccttatatgttgttctctgtttagataaggacaaagaatagacaccagaggaactgaaccaaacagctgaggcagttggatatggtgcggtgaagtaagtatacgtatcatctctattctactggtcacatgtcatgagcagggaaattacagccgtttatcagaaagtctggcaaagacatagatgagctgaaacaggtactttagctgcacgaacattaatcacttttttaactttattctttgttcctctttgctgcacctgaaactttcacattgtctctatcaaagaaatgctattaggtcctaccaaacacagttcgataaagagtagttcttatgtttcaacaacatctgcttcattgcatatacttgtttcatatttgacttctttttcttggtaacaagatgaacaattgcataactcatgtgtaaatgatttgcagacggttgaggaagcttacaccaacttgttaccgagcgtactgtgcgagtacctctacagattatctgaacactacacggactagcgtaccatgaaatttgtggattggcctctgcagctttgtttgaaattcactatagcttagatggcgaattggatttagacatggacttccggattgtatgttgtctttgagtctcaagggattgattaatgtgatgatatttatacaccatagctgaaatgaaatttgtacttaaaactgatggataattaataacagagacggttaaggaacataatccaactaccaaacgacataagtaccatgaacataaaataaactactaagatatgtaagggataatacaacttaatcatctctatcagttttcgtgtttcctttttactcactgaggataccactgaagatctggtggaggaaatgtaagatcttccggctgataaacaggctgatccgcaagctccacgtattcgtcgtcgttgcgaaacaagtagcggaccacaacagctaaacagactatcgaagcaataacactaagtcgtttttcaacaaaaacatcccagaaaagattagagacaaaagcaccgagcttggggaggatgaagaacgtgaacaagaatgaagcagcggccttgtaatagaactgaatggcatggaatgccactaagcggcggaaggagatcggcccgccattatcgtcagccatcgtttctttcttctctgtgttttcgatttcagatttctctgtgctttaatgtccgaaccactcactctgatacctgacaacctgagctaaggacttttttcccactcgtaggtagttacactccatgtcattaattatcttggtttataggatataggtttggtaagtatatacatttccggttggattttggttaaactatttcgttttgttttacagatcagaaaaacaaacggtttatgaataacttccggtttggttttctgtttaaggtgatgttattggttcctaatttacaaggaattttgatgacttcaatcaaatcctaaaaaataaagaaatgaaagatttttaacgattgttagaaagtttttttataattttgttgattagtttttcataattttgtaaagtttctcaaacaatctctctattttgataatatttttcataattttccatgacttcattttgtaaagaaaaatgtcgaaagtcatgaaccaataacataataatttaaatcattaacaatcaaagattctttgttttaattgaataacacaaaactttcaataactttataagagtatgaatctaataacccaaaatttatgaagattttagattactttgtacaaatcttaaatgaataacacaaaactttaacatactttaaaaaaaaatttattgaataacaacagattttacatgacagtttaaattactaaaactcttttgaaatcataaacgaataccaccccctaagttttttttgatgaaatagaaaaagagttgttttgatttagtagaaatagagtttgtttgatgttatatcaaaagagtttgtttgatgaagtagaaatagagtttgtggtatgaagaagaaaaaaagtttgtccgtgtgatagtttataagaacaagtagcaaaagagaatctacttatacatttttggtaaaggtttgtgtaaaaaaattttaaatttaatattatttagtttttaatccctacaaaaaatatctaaacaaaatattctatagtacaaaacttacaaatcatcaaataatatttaatccttacttaaatagtttcctttcgtgaggtccaacttcttaatatttacacttgagtaattgcataatatgtctataaaaacttaaggcccaataaccatccaaaaactgcaaacatatccaactcatcatatgtctaaagaaacttaaggcccaataaccattgaaaattcgtgttttgctccccaagcaaaatatatatgttatcgaaagccgtatttagaatacaataactgcgtttctgcgtagcaattaattcgaagtccaagctcaaactaacacaactagccatcctaacataatcaccttggaagaagaatttccaaggtttcatgttgactggtggtggcggtgtagaatgcagacatgaagaatttgacagtggagatgaaagaagatcggaacatggagaggaaggcgggtaccactctgtttgctcaacaagcggagaggacggtggagagaaattctggtaaaactgatacgactttgtttgctccataggcggagtgagcagtggaaaacaagtctggtgaaactgatacgactcggttaacaaaaatttatgataaaaaaaaaagtaaattaaattgataaaaagtaagcaaaacataagaaacaaatggaaaaaaaaaaacaaaaattatagatataaatttgagatttcagtatcacttgactcggcttcttggacttgtgtctcttccaaatttatttcagcctcagcatcttcctcattcataaactcaagatccatgctgcaacatcaataaaaaaaacctttgtaagttcctgttatattgcaagatcacaaaaacctcacgtattaaaccattttcagctttgctcaatcaaatcaaaagataaaacttagacacttctaatgccaaagtggataatttcaaagcattcaacgtgttctaaactgatattttcttttatatatggaatgctttgagaatgggttaaccgggcagcccattttcattgggttttttaattttcattgtttttttggtttcaattatggactttactgtcgtatttgctcggcagctcatcatccaaacccaaacccaaaaagtttgtaagtgccaatccccatagtctatttggtggtggtgtagaccttttctccttggtgatcattgctgtgatattcgtggtgattgtgcatgtcttccttaggtgaataagagcttgataaaaccaattttttagaaagaaaaagcttaattaggcaacaaaacattatgagaaaaagaaaataaattaaattgataagaaaataaacaaaacataagcaaaatttaagaaaatatataaattcaaaaaaaagaccaaaaatgtagatataaatttgaaatttcaaaaactaggtacattggctaatataatatagtctcatatgatagagaccatggtttataaatcagcagatcataaccagtagggtcataattcggaacctcatatcatagaattgaaggtcgaggcgacggtggtgacagtgagaattatatgttgacagaggatcaaagtacaaagacgactgataaaaaaccggacacggaagctttgatggcggagaatcagagtacgaagacgactgatcataagccatagagtctcttagagcatgaaacagagtggaggaataatgaaaagggtaatcagtatggagcacagcaaggcgtagaaaatttgaacccaagtgtggcgatcaaaaatgcgacgactcaacggctttgttctttcgtttatactctgttttttatatttttaatataaaaaaagagctgtgagaagaagaatgagagtaataataatattcatgttgcaaaagtaaaaaaaaagacttgcgtaacaaatattatatggagctcatttaatttatcatttatcacttattgtaatatttttgtattttttgtgttatatatttgctctttcattcagttgtaaaaacattcatcttcatacaaagaaaaccaacgtaaagcttttttctattattactcttttttcatgattgctttccttctcatatttctttctcttatagtatatttattattattccctttagaacatgaaaaaaaaaaattgatagataacttacgatacaaaattctattaaattacaacatgttattagcatcatcactcggccacgttaatctatatttttatcggagcgtggctctaacgccctttataaatataatgcttttatgtggttgtttaacgcaccatcttatttattgtttttaactttttaatatagacagttttaatcatcataatttacttcttgtttctaaggatgattttaatcaccatatttcatttaatactctaattcacagttttaacatggatgattttaattaccatattgtatttagtattttaaattattattttaacatggatgatttaaatcaacgtattttttatttaatgcttttaatttattatttttatatagatgattttgttatcatatcattatcatattatcatttatattatatatgaggctcaaccatctaatcttatgtataaattaatatatatttttcgattatttagttttagactaaaattttatattttaaatctcaacgatcttaaaataaataaatgaaattaattagaattacaagtttgatcgttctcaaaatataacttactctataaacggtaagttagaattacaagttaattcatctttctaacattaattaaagatgaattgaagtacataaaaaatcaaaaacaatattccttgatgatccagttttcgtttgcttctattatttccaagactcgttgaccttaataagaagatgaggtccgtgagagatttcaataatgcacaaaaatacacgaatccatatataagctatatatacagaaatacacagaaaaaaaaagttaaaattgtcgtttagaacacgttgactttcaataaaaaacttccatatataaaaacacgtgtatagacaaagttacacacacgtaaagatatatcatcatgacagaacagaagatggatcggatgtacgagagaagtgacgataaacagagaataatagatcaaaaagaacatggaaacattacagaaataaatttacgaaaaaacgtacaaaataagagaaattattttggtgataattaataaaattaagtcaacggaagaaacagacgaagagattcacgagatatccgccttgtcatttatttatcttttgtcctacaaagagacatttcatggcccgacttctccgaccattatatgtcctaatagtacttcttatttatttcactttattagttctaacaaacttaatggacactccattcaaaaaatttagaacgtttaccatcaatgagaacaaacattttgaatcgagatataagttcttaaaactaaatttagaattgatttagataatatttatattgttggataacaaaatcaactcgtagatccattgcaaaatagtcttagatttcgaatggagacgtgcggtttaattgcagataaagtgcggtgcggttcaaataataacaaaaaaaaaaatatatatatatatatatatatatatataaagaattttgttactatttgaaacgcaccgcactgtgcggtttggttactattcgaagccttgctctctttgtttagtcttatagtatgtctaatattatttgtctcttcaggatatttgtggagatatacacgtagttgtgtcgattcttatgaaaagaactaagataagaaggtcccctacagcgtgattcttggaggagaactctagatctaaaatgaatttggtaaaaaatactcaacgagaagttggtttgttgttattaaaaaagggaaaaacacatttctggtagatatgtgtaatcaaattacttttaaagtcagagagtcaacggactgtcagagtcgagtcctgggtccgtctagtcagagagtcaagcatttttttcattaaccccatcctcattaaatccgacggtgctggtgggcctcttgtcttgttgtctatcgtccgattagatcttcctacgtcatttatccatttccatgaggtcacgctcatactcttcgttttcttctctatgtttttgaactttcagtctcgagttctcgacattttgacatcaccaaaccaatagacttaatttcttaattattttagagaagactttgattcgtttgttgaacataacgtttttttcaaatccatttcatcaatgtactcgcgtacgtttataaaagcgatacaacaaaacaaatttcataaatttccactaatgaactctatagaatttatagaaacatttatcatcgcaatctaacgttcaaaaatttttcattaatggacttagctctcggatctccacgaggtcatgctgcctggtcggtccaaacaaattcttgagattctctatatgaatgaaaatatcgttacctatcaaaagtatttttattttgaaggaatggatcgtagaagagatgcgacatacgtcattttcatgcattaagttttgtccccacaattaaaattaaaataaaagttaaattttgtaattttgtgtaaatgaagacaaatcattcttcgatcaacttgtggctgcattattggctgggcggtccatacaacacacacacaagataaacataaaattgtacgtcggtcttattcttccatgcaatttggttggttttattctatagaatagccatccctcaaaaaaacccatattttggtttatttattgtttgacataccaatcttttcactttcataccttttaacatatcgtttcaacgtgaaataattatttaatttaatatttctatcattcataaaatcttcaggttttcgtttttctttctaaatttataattaccaatttagtttcattgtttacattagtggtaattatacacagtttaattatcttgtagaattttagcactatatattgcaagttgcaactgattgataccagagatttatatcccgtgtatataagtctggagatcagcttgaaatatattaatattggcttttgactcgtgttgtggtgatatagagtaaaaatgttataataagaagcaccgagaggaattgacaaaaacaaaaaacacagagaggaaaaacttatctttattgtaagaaaaaattaagaaacatacttttggagcttagttaactatttaatcagcttgaaaatagtttatataattatattatccctatatttgtttgtccaataataccttaattttagttttcctcctatcattttctaacaacttgcaaatatcttatcaatcatggacgatgcctttgtattcataggccggctcatgatgatataagacgttggcgtcacctattggctattgagcataaatatatactgtatttcattttttctcttttcttaaaatgtagaatatttttttttattttttttgtgtggctgtaaatttattatcttgtaaattctttcgcttgagcatttaaggaagcatttcatcagtttaaatggctcatttatgaaactttcaaaatcagttagacgaataggtaattcttgtatgtgacgtaactattcataactcatagaaggatatttcgttttggatatggaaacccaaatgtgagatatgcaaaaaaaatatgaaagtgaaatgggacatatatgtaagatattaattaatacataaaaatacaaacaattgagtaaatgcaaaaagagccaagagaaagggttgacaaccgccaagaaggccaagtccacgaaatgcctgtggctcccaagacaggattgtgtgtgtaatttacacgatcttatattgacatatttctaccctaaagtagagtcaatatcatgtatttagtgaagtttttttttgttacaacagttgcgttttagaatttaaaaaaacaatcataaacatgatgcaattacagtatgattgactttaaaattgaaacgaaaaatccattttagattatgatcaacaatatattgttttaattatgattaaaaccttacagaaagtttctaccaacaagagtctcttagcaaaacttaaatcattagtaagtaactcatgaaagtattttaactcccaccataatcttttaatctaaataatatgatttattttgctcgtttttcacagtacatagttacatacggtatatatgtgtagaggctctttggtaatttctctgaacataagatatctaaatacctatgaagaaaaatcagttactgttctagatattttccgactacgtgagaccaggacaaatatagccaatcacgaggaaaaatatagtcttattaacatagtcattggttcaaccaacaaaagctaaatatgaatgattttattggaagttaaaaatgtctcttttaactacaacattctagtaagagattatcccaaaaagagaaaagaaaaaaaaaaagtaagagagatttgatagtgaaggatactcaatataaacttaataagtttgactaatatactaatatagtattaatttgaaaatgatgtttgtggattacataaaatctaatatccaaattatattatcactataaatttaattattttaagtacacgatttgatgagaaacgagatagtgttgttggttaaccgattcaaatttctgttttattaagttatcgaaagtttaataattaatagcacacaagaatgtaaaagatacgatccaaatcttgatttggagagcatatactttttttatattaaaacaatctgtccatacatgtcattggaatctagatacatcccaaaacaatctgaaatatatttattattgcgaaaaagaagggtcaataatcataagagtgtgcctattatactagtatataataataaagttggtggaataatgaaatactaaagttcaattattacttgtaaaagtaaactaaaatcacctaactacaaaaactgatgaccaatgaaattgtaatgatggtaaccaaatccaattaaattctattctgggcaaaaacgaatcgataattggttaaaagtgttattttagttaggacaagacttgtgatagtgatcgcataagacttttaggggttttattactggacctattctagcatcatcctatttcaaatccttaaattcttgttctcgaacccgctttaaatttttcctcgtttcatattataattgatttaagcaaaagtatgatcggtaggaaattcttacagctattatgcacttttataacatttgttttccaatcagactcaagtgtatatagtgtgtcccttctaaaattcacaacttctataactatattatattttctcaccacgttttgtatctttccttttttgttttggtttaaagcaatatgagaattttacatgctttaggtgttttttttttctttttacagcaagaaaaaatgaagagtacaacccaaagtttacagagtaatggtacaacaattaccagacgaattatcttcttacagcttggttaaatcaattgctaaagcacaaactaatggcgtgtatatatattgcatatttagccaaatagtaagcttgaagattctaagactttcaaagtaatcccttgctgagttgctattatgctgtatatgtacaatagtatataataattaaaactttaacgaagacaaactcatgtgaaaatgtaataatcagaagacaaaatataagttaataatatgtcatatatataataatagaaatatatgttcttttcgaattaaaattaaaaggtcttaattttttacaattgcaaaaactttaaactgaaaaaatgatttaatcttctggaatgtacattatataatatccgccaccctacttgctacccctagctaaaagccaaaccgatggaagactcgcttgcattaaattatgcactagcttaatctacttttaaactctcttataatacatttaattcctaatttctatcgccattttatatttttactgatatcaatattcgaagggtccatgcctatgattccatgtcatacataatatttcctttcatacctacattcattttaatgaaaaccttaaatatatatccaaaagctatacatttatgtaaactaaactggtataataatttttgaaatatgtgtatgtctactgatttactatttgattagttcgtagtaaatatattataaattgtttaaacataaaaacaaaaaaaatcatgtaactagataattttcttgacgaagattcgaattaacaacacaaaaaagttcattttctgatatcgcaatggtctaattaatggttgttgaatagtttatcttttccacgtttcataagcttttttggtacgcgacatccatattgaaaaatgtctgtctacactgagctcaatccaatgaaatttgttgtgaatgagatatatgcattcacggatttctaaaaaatatgaagtccatgacatccattgaaacatttgacaaaataaaaatataaaatatgaagtcattacaacgtagagtaaggtttctaaaaaccccactctcgtttcgtagaagccccactaccacctcactttaatttcattcattatctcatttacgttgatactttaaattcatttttccatataaacttgtaagtatgaaatttgtacttagtatatattttatctatctttccatgatgaacttaaatatattacagtttgcctagcctttttagctcagctatatatatatatatatatgctaatgttgttacgatgtttattgttttgtgtctatatcttatttacttttttgaattattaataaaatggaacaattatacatatagattatagatacatatatctaaatataatatattgtatctatatatattaatacaaattttaaagaactggcgggtttctaaattctaacatatgtactgtaagttcagcttcttactaagtcataggaacatggagagcgttggcaaaatcatggtcagtttgttttgcattcataattgaagacatagtagtatcatgcaatgaagatatggtgggccaaatatatcataaaaaaaatagcgaaacaataagagaacgttcgtgaagctgaagcatatgaaaaacacgtaaatatatttatgacgagtgacatagtaagcatacgtgatattattatttaattagtaatataggccaccaatcagaattctttgtctcaacgatgaataaattaactataataatccaaatttttaacattgttttaagaatatccgttattcaattagtctacctataacaatgaattattatggatcctttatcgctatgccttgatcaggagaattagattagttacactttcgcaatttttgtagcgatggattggaacaaaaaccaaaacaaaatatagactatttacacataaattatacatgaaatcaacttaatttgttattctctaaagtttagattgtctttataaaataccaatcatatacctaactaaaactaatgaatctttaacgtgcatgagatggtgcatgtgcaaataaaactataaagaaaaccatgatatattttttctaagaatgatagtttttgggaattttagactttcggtctatatttttcgtatgtccacaccaattgttgatattgcatttaaaacattaattattattttttccaagtataattgaactagtaaccatgaggtccatgacatccatttgaaagatgtcaattcgtaatattgtttcaaaatattttttcgtttataatacataaactttaatttttcctgtaaaagatatcaactgttcttttcatttgtgttacaacccaataattattaaatatttgaaactttagtatttagaaaaaatacataaaactaatagatagatattttattttattttgaaacaaaaagctagaaatggagagtgagagaaaggtccaaaggcacggctaagaaaacaaaaccgtggacaccctgtcctcaatttgacaagtctttgtctcctccttaactctcttcttctctctctttgtcttattctagtttggtctcaactcccaaaaacgatgacgtttcattcctatatagtcgtcctctcttcttcttctcctcctcttatctctactcaacaccactcaatttcatctctctttttcccttccattgttagtataaaaaccaagcaaacccttaatcacttttcatcatcatatatcaccttaatccacatgcatacacatatctagtctttttgatatatggcaattgtatcctccacaacaagcatcattcccatgagtaaccaagtcaacaataacgaaaaaggtatagaagacaatgatcatagaggcggccaagagagtcatgtccaaaatgaagatgaagctgatgatcatgatcatgacatggtcatgcccggatttagattccatcctaccgaagaagaactcatagagttttaccttcgccgaaaagttgaaggcaaacgctttaatgtagaactcatcactttcctcgatctttatcgctatgatccttgggaacttcctggtaaatatacattcacataaacacacataaatcatctcaaactatttggaaatcttaatttctattcatatgttaagatctttcttctctcttatcactttctctctctatttctttttttttaacctatatatgtacctacctccttatgaagtattactatgtcgatcgttaacaattctcaatatctttaaacgcttctccctctttagtttctttcttaaattaacctaattaaacaacctacatatatatcataagatatacaaatatgtgtatgttttcataattagcttatgtatgtttaatcatagatatatgtatatgcagctatggcggcgataggagagaaagagtggtacttctatgtgccaagagatcggaaatatagaaatggagatagaccgaaccgagtaacgacttcaggatattggaaagccaccggagctgataggatgatcagatcggagacttctcggcctatcggattaaagaaaaccctagttttctactctggtaaagcccctaaaggcactcgtactagttggatcatgaacgagtatcgtcttccgcaccatgaaaccgagaagtaccaaaaggtataaattctactataactctatatatatcctattcatacatacatagatataaccctagctaggtggtgaggcctttaaaattgaaattaatccctagacagtttgaattttttcttttttgactagttttatttatttattttggaattgattcgataagatcaaaaatacttgtgaatggactaaatgtcaggcggcgtttgcgcttaaatccagaaaaatgttcatgtcatatgcgtgaactctttaaattgctagacatggcccatatgttatagtagaatacattaatagatagatgcatacacatatatataaacacacaagtatcacactcgacattcatataccttaattctgcagagacatagttagtttttcttacaatttatgacatgaatgttcctgctcttcctcacattaattcatgtcttctatttaagttacccaacattttttgaaataatttggcatatatgaattataccaacatatttatatgcgaacatttaaaatctatacgaatgataacggtttatggagtagaccgaaaaaatattatgtatacggaaaatgacaatggatagataaatacattttttgggctctttcgacttatatgtcgtcaccatttgaaaccataaatttataaaattttctatgtatatatatgatattatgatgtatgcataagacagctaaaacaacagggttgacataattatctatgtgtatgtattgcacattcacttgtactaataaaactaaaattacgcaattaaatatataaaaaataataaatataatcatcttaattatatttgcattgttacgtcatatgatagtactctaaatttcttctaaacgtgctatctttttttgctaatgctaactttacatagtttgtgaatcttctttcaaaaccatatcttcgataaatgatatttttcatagatattgttagtctatatttgataatttgatatatgtatcaagtctctaatcaatgtgctcatgtataattataggctgaaatatcattgtgccgagtgtacaaaaggccaggagtagaagatcatccatcggtaccacgttctctctccacaagacatcataaccataactcatcgacatcatcccgtttagccttaagacaacaacaacaccattcatcctcctctaatcattccgacaacaaccttaacaacaacaacaacatcaacaatctcgagaagctctccaccgaatattccggcgacggcagcacaacaacaacgaccacaaacagtaactctgacgttaccattgctctagccaatcaaaacatatatcgtccaatgccttacgacacaagcaacaacacattgatagtctctacgagaaatcatcaagacgatgatgaaactgccattgttgacgatcttcaaagactagttaactaccaaatatcagatggaggtaacatcaatcaccaatactttcaaattgctcaacagtttcatcatactcaacaacaaaatgctaacgcaaacgcattacaattggtggctgcggcgactacagcgacaacgctaatgcctcaaactcaagcggcgttagctatgaacatgattcctgcaggaacgattccaaacaatgctttgtgggatatgtggaatccaatagtaccagatggaaacagagatcactatactaatattccttttaagtaatttaattagatcatgattattatccatgacaataattattaatgctgctttgccatattttcatactccttatatattgttatggcgatagacaatgattgattactgcgagtttatgtaatggaactgattctcaacatatatagtcaattaagtagttttttttttcttgtgttaaagttaatttctttaagctagattcaacgtagttaaaaaaaaaaaattcactgtaatatatgaatacaaaatgactaaggagtgcaatccgtatcaaaagttctcaaacaaaccaaagaagaaataaacttattggattagattttcatgtacgagccctaaccgaaaccagactaaaaccaaacactaactaaaccataacaatagtaaccgtaaatccaacctagtgatatttaatttggtcttcattccatttcaaaatttcaaattgaatgttgatattttttgttgtttattcatcacttattagaattcattttgcattgtcatttacatgcattagatccaagatgtttaattttagttacctgttagtgcgactttatagataaacaatccactaactcttaagaattcaacaactaattttgagatagaaatatataaagataaaagatgttagctagttttttgtctttgtaaatataagactaattagggtttgacaaaaaaaaaaagcataggacgtgcaatatttggtaagagcagttgttcccgtgattttgtcagatatgaccagcatgaacagttgtatgttgtaagaaatcagttccctttttctcaatgagaaaaacaaatttaaacttgacttaactctcatactagtctttttaatcctaattattaacaatctttaataatatatgtaatgtggcaaaatcctaatatatactgacttgaatatgatacgaaagtactaattttaaagttttttccctttctaaccggtcgatgtaaccgtatttgcatgttttcttagattattttaaataatatatgtctatcacctatattagtaagtatatattcatagattatagttgattttgcccaaagaaaaaagaagattatagttgattataccacatcattgatattctgtgacgaattagattacagttgcggtaaacgtattcgctagctagtacgacgtgcttaacgcaaaaatattcaaagataacgaatccgattaatattggttcgtttcttaattcttacatctagaatcacacataaaaacaataaaataattaaaaatttgatgaattttttatttttttgagtgataaaaggcaaaatgttttccgttttttagtagctttctctttcaaaatatctatttctggtgtatatcgtgaaaaaaactttcaaaatacgtgaatgtgatgatcgttgaaaacttcaaatctcatttcccctaggttactataaaagcccactatcctttaatgggccaggcatgctatttctgtacaatacaagatggacctgaatgttttaacttttaacttttatctttaaggtcaagttaattgaaaacaaaaaccaaatttgtggatcaatttggatgcctcagcctacgtataaaaacatgtttttttttcgtaatattaatggaaatgaatatgttaaaaaaaaaaaatacatgtttttttcgtcgacacttttaaaaataaaataaaatttaaataaatgtctttgaccaaaataaaaataatgtaaaatttgggagtggggaatgtagctcggaaaaaaatagggtatgtagatcggaattaataaatagattttatattattacataaacaataataaaatacacaatgttgtctttatttaattaatacaaaaataataaaatagacaatgttgtctttattaatattacttctcagccccaaaattaatctttgatcggtcccttttgttttatcgttttagggtttgtagctcctttctctttttttcttttctcaatttcccccaaattaaaaaaaaactctctctttcagagatttacaaatttcatttctccaaatccgaaaccccaaagtgaatatttttccttctgggtttcttttgtttgcctggaaacatttgtctcagattttgattttgaccggagtactcatattctccggcgatttctccggcgacatcgtttgtgaaatggagggaattactcatccaatacctcgtactgttgaagaggtctttagcgacttcagaggtcgacgagctggtcttattaaagctctcactaatggtcagttttggtctgattcttgtttctcacttgcgaatcagaatgataagtatctacagagttacgattttgtggcatttgggtttttcatttgttaaaaaagaagaactttttttattttgggtttcttttgtgagatttgacgattctgggttttgtgttttgtttatgcagatatggtgaagttttaccaaacgtgtgatcctggtgagttatttcttcacaacttttaaaaaattagtcttgcttagcttctatagtttctagtgaaatgttttgttgaagttgttgagcttgtatgttgttgaattgtgttggttaaagattgagttagttagtcctcctctgtgtggtttttctttaaggtgtttcattcttgtttatgtagagaaggagaatttgtgtctctatggacttccaaatgagacatgggaggttaatctacccgttgaggaagttcctcctgagcttcctgaaccagctttaggcatcaatttcgctagagacggaatgcaagaaaaggactgggtatctttggtcgcagttcacagtgattcatggctgctttctgttgcattttactttggtgcacgtttcggatttggcaagaatgagaggtaagggtccttctcaagctcagtgtttttgagtgttgcatctcaattatgacaatattgggtgtactcatgtgtggtaaggttataatgatcattctagcatcctcttgttttgtctatttgtctgatacaacaatctctgtgtggatttttgtaactcacgtgatcttatttatagggtcggtttctgtgtaactctttttgtaagtggttcccagtttctattttgaagtgactagagttatgaatcgcaccaatctggatcaatgttattgagatagatatattagtcaatagatgtgatatgtgcctctaagtctgattagtacttcttgtattagtcttgtgcaggatcactgtaattagcctaggtagtttccactgcattgtacctttgttgagagctcagcaacaatcactgaatccattatttgatactggtagctgacaggttaaacgaaaagcttgagcagaatgagttgttgattctgaatctcatcaaattcttctctggcattaggtttgtttgaacaacttagctatcacttgcctttaagcttatgccatggaccgattctttttcaggaagaggctgttccagatgattaatgagctgccaaccattttcgaagttgtgagcggcaatgcaaagcagtccaaggatctatctgttaacaacaataatagcaaaagcaaacctagtggcgtcaaggtatctcttctgtttcaccattttgttttatcaatctctgctaagttttatctctttgtattcctcacaaacagtctcgccaatccgaatctctctcaaaggttgcaaagatgtcatctccaccgccaaaagaagaagaagaagaagaagatgagagtgaagatgagagtgaagacgatgaacaaggtgcggtttgtggtgcttgtggagacaactacggtacagatgagttctggatttgctgcgacgcgtgtgagaaatggttccatggaaaatgtgtgaagataacacctgcaaaagcagaacacatcaagcattacaaatgcccaacttgcagtaacaagagagctagaccttgaagttaaataaccaaattatgaaaaggtaaagcgagttaggagaaaattatgaaagaagaaggtgaagtttccagtttataagaaatgccagtaaaagggacttagaagatgtaagcaggtaaaaaaaaaaattgtattgcttagtctttattgttggattgagactatctacagttggtgatgtcttttcttttctttttttggatttttgttgttgttaatgttaattctactactaatttgtttggtctgtttaagatattttagttctgattagtaattttttttttttttttctgattagtaatttgctaaaattgtaaaaactattatgtcgttatgtagtctttttattcatcttttatcttactctctcttttatttagctatttattttgtttcatatgattggtagttaagttgattatatcaccatatattatgaaattggtattggtcaaaaggtatcagtcaggattaatacttctaattttttttaaaactgtttcattattgtcaaaaagaaaaactgtttcatttgaaaaaatggttcaagtattaattatctaatacttctattgttttttcatagtgcaaatatacattgccatcaatcttgttgtcttttgaacttttgctatatatataaaaaaaaagattgaagttgataaattatgacagcccaaattattacttgactagatctatttgagcccaatgttagacaaggatgtgtgtttgggcatgtagcttatatatcatgccactcatttattagtttacttttttttttttgggtaatatgactatctatcctcagaataatgataattaactgacaaaaaaaacaccgttgtcttctactattttaattttatgacaattatacccctaaattaattaaactaaaaataaaaggttcgatgaaacattagtacgttaaatgaaacatttagtacgttcaaataaatattatccatatatcgattatcttaccgtgttaagacaaatattatttcgatatttagtatgttaccatgttattattcatatatcgattatcttaccatgttgagacaactattatttcgatatttagtatgttagcatgttattattctatgtaaaatgttattataatcgttatcattttaattatataacatgatgtatttttattgtgttgatatatataaaaataataatattgattcataattttaaatcgataaacatttatttaacatagaatatgtaaatttaccacgttattatatatgttagcttgctaaacaaatagttatatacttatttttaaatattaaagttattttgaatcgatgatatttttgtaattaatctaaacaagaaggatatttctagtttatattttatttctcttgtctatttacctaaataacagatttttatgtataaattcttaatattttgtttattttgttcatccatgtatatatttttaactcacccttttttccctccatttattagtttactatatttttatggatttaaacataatttttgctcattgacaaaaaaaacataatttttgcttttcataaattatctaaagggacacaagtgtgtgtgtcattctcatgcattatgcaacatattctcaacatgcaaaggctaatcttggatacattaacttttaattaagatacactccccaagttaaattttatttaatatttttcttcctcttgcatatattattaactttttcttatgtaataaaaattgtctaaccattttcattttgccaattaaagtagtgttatgttctaggtccattataaaatttcgcgagtgtattattcgacagctacattcacccaaaaagattaatcttttgataaaagtttggattactagttgattataaaataactaaataactaaaagtgatgaaataggataaagtgaagttttaaaaaaaaaattatgaacaagataaagtgaacttgttaaaaaaaatacatgaagtaaaagactataaatatatgggccacagggacaggggccttcctatatctaacaaaaccgttgcatgtgcttttattaggtattttgttattttgcatgcaaactataaaagcattatttaaagaagtcaagaacccaacctaaaaaaaaaagaatccaacctataagtaaccataagcttttctttaatgcaagttcaaaataaactcaaataagtacacaaacttttcattgtcaacatctttcgtttggtgattaccattaaaagcaaaatcactggatcgatcaatgttgtaacctaatcattctcttttaatgcttaatgcttcaagccaaaatcaagttgatagatatagaaaaaggttaccaaattaatccgttaagacttcattttagtggatataatttttgttccttagtcttgcttagtacgcatagattttaatattaaaactcacaatacatttatttagtttatatttatttacgaacctttgggttctatttcttaatatcaaaccgaaaatagaagttatgattaatttaattttgttctaattttggtatatagacgaatcaaactagacttaattaaagcataagcattctagtcaatatgttttttctttgttaaagattatatttaatatgttttgatcattggaattatcggattgcaggcgcctttaacattggtgactatgcgttataggtaatgtcgtctaatctaagattcgtctattcggatggtgggattgttatttttttctttggaaattatacgtgcatgggatgtatcaattttttttgggtgcattgtcaaaataataataattagtgttgataagaataagagatcgagtctccaaagtccaaatccatatttcggtaatgatgttatgaaaaaagtatgatactattaaaataaaaattacggcgcattatcctttgtagagttgacaaaacaagaaaaaattgttataatttgattggaataaattgatttaagacatggtttggaagtggtgaattttcaatgtgtccacatgattttccatctaatcctttctttaaactttcttagatatgtctgaccaattacttatcattgaaagttagctcaacatttgttttttcttagcagctagctagctcaacatttacctcagtgattattattcgtaatttgtttctgtttgttagaaaacttaggaattattaattttacagaccaagtatttaatacttagcattttggattattataaatgattaaatttacgttattagaaatgttcctctattcttttttcctttttgcattaaaaatattccttgaataataatttcttctctatgcacgtagataccttgataacaacaacaacgtagttgtcactaccaaaaaaaaaaaccaacaacgtagttgtgatacaaatataactgaatcaataataataataataagggaccgtaataataataaaatactaataatagcaacaaatagtcatgtgatgttatacattttcgtcggcgtatccaacggaccaaacattaaaacagctaacacatacgattttattttacagtaaagacatttgtcaggacaaagattcggcctttcattgctcataaaacactggtgagatacataattatcgaattttatcaatccatgtcgtacttatggacatttgtatgtacaagaattgaagtatatagccaactagttttgttggaattgaatgtgctaattaacatgagaaactaagtttagtgatctctagagctcttgaatcatgaacaaaataaaatgatcataaaagtgttgttaaagttataacaagctaatttttcaactttcaagatatgtttttgatttagtttctttttctatttgctgcaaattgttgttgttgttctttttttttttcttgcaaattgtttttacatatatttactaagtaggagaataagatttagggtttatgagaaaccctctcatctttgcataagttattcggtgtctgttaacaacaagagagaattttatcgatgatggtattatagtattgatcacattaatggaaaaagctatataacactatatactgatgttttaaggcttaaaaatatggccaaattattattattatatatatatatatatatttattattttttttgaacggaaaaaagccagaactgtagtcatatacatatatctgaatatagcgtttaaaaaataattgtgttatcattgtatgacactcaaaattttcattttttgccaattttctttttagggtacattgataacataagatcaataaaaatatattatggcatcagttaggtaacatacagtatataaacaaaagccacatgttgaaaatacgtaaataagtatgcaacaacactatatcgtgataagaactaatattcaacaacactactttattatcgtagcaaagtatgataatcataaacatttattttcacacagtaactatttttttaaagataacatcataaaagtcaacattatattaaatatagttataacataatgtatattcttttttatttattgtactgtaaatttattcaacaaccaaaaaacttccttttatgaatatgaaaagaatttgagaagctt
